United States Patent Application Publication US 2016/0331844 A1 - sequence listing, part 4

SEQ ID NO: 9078 - RNA, 2985 nt, Artificial Sequence
  derived and/or modified sequence opt3 from NALP4__Homo_sapiens__CCDS12936.1
auggccgcuagcuucuuuuccgacuucggccugaugugguaccucgaggaacuuaagaaagaggaauuuagaaaguucaaagagcaccugaagcagaugaccuugcaauuagaacugaaacagauccccuggacagaggugaagaaggcaucuagggaggaacuagccaaccuccugauuaaacauuaugaggaacagcaggcguggaauauaacucuucggaucuuucaaaagauggaucgcaaagaccugugcaugaaggucaugcgagagcguacgggguacaccaaaacauaucaggcucacgccaagcagaaguucucaagauuguggaguagcaaauccguuacugagauucaucucuacuuugaagaggaagugaagcaggaggaaugugaucaccuggacaggcuguucgcaccuaaagaggccggaaagcaaccacggaccguaaucauucaggguccgcagggcaucgggaaaacaacccucuuaaugaagcugaugauggcuuggucugauaacaaaauauuucgcgacagauuccuuuauacuuuuuacuucugcuguagggaguugcgggaacugcccccuacaucgcuagcagaucucaucucacgcgaguggccagaccccgccgcuccuauuaccgaaaucgugagccagccagagcgacugcuuuuugucauugauaguuucgaagaacugcaaggaggcuugaaugagcccgacuccgaucucugcggugaccugauggaaaagagaccugugcagguuuuacugucuagccuccuuaggaagaaaaugcugccagaggccuccuugcuaaucgcgauaaagccggugugucccaaagaacugcgggaucaggucacgauuucagagaucuaucaaccucguggguucaacgaaagugaccgccucguguacuuuugcuguuucuuuaaggacccaaaaagagcaauggaggccuucaaucugguaagggagagcgaacagcucuuuucuauuugccagaucccccuguuguguuggauccucugcacuucccugaagcaggagaugcaaaagggaaaagauuuagcucugaccugucagucaacaacuagcguuuacaguucuuucguguuuaaccuauucaccccugaaggcgccgagggcccaacaccccagacccagcaucaacucaaggcacugugcucccuugcugccgaggggauguggacggacacuuuugaauuuugcgaggaugacuugcggcgaaauggagucguggaugcggacauuccggcccugcucgguacaaaaauacugcuuaaguauggcgaacgcgagagcucguacguguuucugcacgucuguauccaggaguucugcgcagcuuuguuuuaucuccugaaaucucacuuagaucauccucaccccgccguuagaugugugcaggagcugcuaguagcuaacuucgagaaggccaggcgggcacauuggauuuuccucgggugcuuucugaccggacuuuugaauaagaaagaacaggagaagcuggacgccuucuuuggcuuccaacucucccaggaaaucaaacagcagauacaccaaugucugaagucauuaggugagcgcgggaacccacagggacagguggauagucuggcuauuuucuacugccuuuucgaaaugcaagacccugcguuugucaaacaggcagugaauuugcuccaggaggccaacuuccacaucaucgauaauguugaccugguggucagcgcuuauugucuaaaguacugcuccucucugagaaagcucuguuuuagcgugcagaacguauucaaaaaggaggacgaacauucaaguacuuccgauuauagccugauuugcuggcaccauaucuguucuguucuuacaaccucaggccacuugagggagcugcaagugcaggacaguacguuaagcgaauccaccuuugucacauggugcaaucagcuccgucaucccucuugccggcugcagaaacuuggcauuaacaacgugucguucagcgggcaauccguccuguuguuugaggugcuuuucuaccagccagaucugaaguaccuaucauucacucugaccaaacucagucgagacgauauaagaucucugugugacgcccuuaauuaucccgcaggaaacguuaaggaauuggcccuggugaauugccacuuaagcccuaucgauugugagguacucgcuggucugcuuacaaacaauaaaaagcugacuuaccuaaacgucuccugcaaucagcucgacaccggcgugccacuguugugugaggcccugugcucaccggauacaguuuuaguguaucucaugcuggcauuuugucaccuuagcgaacagugcugugaguacauuucugaaaugcuguugaggaacaaguccguccgcuaucucgaccugagugcgaaugugcuaaaagaugaggggcugaagacccuuugcgaggcucucaaacaucccgacuguugccuggauagcuugugccugguaaaguguuucaucacugccgcaggaugcgaagacuuagccucugcucucaucuccaaccaaaaucugaaaauucuucagauaggcuguaacgagaucggugacguggggguucagcuguugugccgggcccucacgcacacagauuguagacuggaaauucuaggccuggaggaaugcggacuuaccucaacuuguugcaaggaccucgcaaguguccugaccuguagcaagacauugcaacaguuaaaucugacccucaacacucuggaucauacaggcguggugguccuuugcgaggcucugaggcacccugagugugccuugcagguucuagggcugcgcaaaacggacuuugaugaagagacccaggcgcuccugacugccgaagaggaacgaaauccaaaccuuacaaucaccgacgauugcgacacaauuacucggguggagaucuga

SEQ ID NO: 9079 - RNA, 2985 nt, Artificial Sequence
  derived and/or modified sequence opt4 from NALP4__Homo_sapiens__CCDS12936.1
auggccgccagcuucuucagcgacuucggccugaugugguaccuggaggagcugaagaaggaggaguucagaaaguucaaggagcaccugaagcagaugacccugcagcuggagcugaagcagauccccuggaccgaggugaagaaggccagcagagaggagcuggccaaccugcugaucaagcacuacgaggagcagcaggccuggaacaucacccugagaaucuuccagaagauggacagaaaggaccugugcaugaaggugaugagagagagaaccggcuacaccaagaccuaccaggcccacgccaagcagaaguucagcagacuguggagcagcaagagcgugaccgagauccaccuguacuucgaggaggaggugaagcaggaggagugcgaccaccuggacagacuguucgcccccaaggaggccggcaagcagcccagaaccgugaucauccagggcccccagggcaucggcaagaccacccugcugaugaagcugaugauggccuggagcgacaacaagaucuucagagacagauuccuguacaccuucuacuucugcugcagagagcugagagagcugccccccaccagccuggccgaccugaucagcagagaguggcccgaccccgccgcccccaucaccgagaucgugagccagcccgagagacugcuguucgugaucgacagcuucgaggagcugcagggcggccugaacgagcccgacagcgaccugugcggcgaccugauggagaagagacccgugcaggugcugcugagcagccugcugagaaagaagaugcugcccgaggccagccugcugaucgccaucaagcccgugugccccaaggagcugagagaccaggugaccaucagcgagaucuaccagcccagaggcuucaacgagagcgacagacugguguacuucugcugcuucuucaaggaccccaagagagccauggaggccuucaaccuggugagagagagcgagcagcuguucagcaucugccagaucccccugcugugcuggauccugugcaccagccugaagcaggagaugcagaagggcaaggaccuggcccugaccugccagagcaccaccagcguguacagcagcuucguguucaaccuguucacccccgagggcgccgagggccccaccccccagacccagcaccagcugaaggcccugugcagccuggccgccgagggcauguggaccgacaccuucgaguucugcgaggacgaccugagaagaaacggcgugguggacgccgacauccccgcccugcugggcaccaagauccugcugaaguacggcgagagagagagcagcuacguguuccugcacgugugcauccaggaguucugcgccgcccuguucuaccugcugaagagccaccuggaccacccccaccccgccgugagaugcgugcaggagcugcugguggccaacuucgagaaggccagaagagcccacuggaucuuccugggcugcuuccugaccggccugcugaacaagaaggagcaggagaagcuggacgccuucuucggcuuccagcugagccaggagaucaagcagcagauccaccagugccugaagagccugggcgagagaggcaacccccagggccagguggacagccuggccaucuucuacugccuguucgagaugcaggaccccgccuucgugaagcaggccgugaaccugcugcaggaggccaacuuccacaucaucgacaacguggaccugguggugagcgccuacugccugaaguacugcagcagccugagaaagcugugcuucagcgugcagaacguguucaagaaggaggacgagcacagcagcaccagcgacuacagccugaucugcuggcaccacaucugcagcgugcugaccaccagcggccaccugagagagcugcaggugcaggacagcacccugagcgagagcaccuucgugaccuggugcaaccagcugagacaccccagcugcagacugcagaagcugggcaucaacaacgugagcuucagcggccagagcgugcugcuguucgaggugcuguucuaccagcccgaccugaaguaccugagcuucacccugaccaagcugagcagagacgacaucagaagccugugcgacgcccugaacuaccccgccggcaacgugaaggagcuggcccuggugaacugccaccugagccccaucgacugcgaggugcuggccggccugcugaccaacaacaagaagcugaccuaccugaacgugagcugcaaccagcuggacaccggcgugccccugcugugcgaggcccugugcagccccgacaccgugcugguguaccugaugcuggccuucugccaccugagcgagcagugcugcgaguacaucagcgagaugcugcugagaaacaagagcgugagauaccuggaccugagcgccaacgugcugaaggacgagggccugaagacccugugcgaggcccugaagcaccccgacugcugccuggacagccugugccuggugaagugcuucaucaccgccgccggcugcgaggaccuggccagcgcccugaucagcaaccagaaccugaagauccugcagaucggcugcaacgagaucggcgacgugggcgugcagcugcugugcagagcccugacccacaccgacugcagacuggagauccugggccuggaggagugcggccugaccagcaccugcugcaaggaccuggccagcgugcugaccugcagcaagacccugcagcagcugaaccugacccugaacacccuggaccacaccggcgugguggugcugugcgaggcccugagacaccccgagugcgcccugcaggugcugggccugagaaagaccgacuucgacgaggagacccaggcccugcugaccgccgaggaggagagaaaccccaaccugaccaucaccgacgacugcgacaccaucaccagaguggagaucuga

SEQ ID NO: 9080 - RNA, 2985 nt, Artificial Sequence
  derived and/or modified sequence opt5 from NALP4__Homo_sapiens__CCDS12936.1
auggccgcuagcuucuuuuccgacuucggccugaugugguaccucgaggaacugaagaaagaggaauuuagaaaguucaaagagcaccuuaagcagaugacccugcaacucgaacugaaacagauccccuggacagaggugaagaaggccucucgggaggaacuugcgaaccugcucauuaaacauuaugaggaacagcaggcuuggaauaucacgcugcgcauuuuucaaaagauggauagaaaagaccugugcaugaaggucaugcgggagcgcaccggguacacaaaaaccuaucaggcccacgccaagcagaaguucagcagacucugguccucuaaaagcguuacagagauccaucuguacuuugaagaggaagugaagcaggaggaaugugaucaccuugaccggcuguucgcuccuaaagaggccggaaagcaaccgcgcaccgugauuauccagggcccccaggggaucggaaaaacaacccuccugaugaagcucaugauggcuugguccgauaacaaaauuuuuagagaccgguuccuguauacguuuuacuucugcugucgcgagcucagagaacugccucccaccucucuggccgaucucaucagccgggaguggccugaccccgcggccccuauuacagaaaucgucucccagccggagcgccugcuuuuugugauugauagcuucgaggaacugcaaggcgggcucaaugagcccgacucugaucugugcggagaccuuauggaaaagagaccuguucaggugcugcucuccagccugcugcggaagaaaaugcuccccgaggcuucucugcuuaucgccauuaagccugucugucccaaagaacugcgcgaucaggugaccaucuccgagaucuaucaaccgagaggcuucaacgaaagcgaccggcucguuuacuuuugcuguuucuuuaaggacccuaaaagagcuauggaggccuucaaucuggugcgcgagucugaacagcuuuucuccauuugccagaucccccugcucuguuggauucugugcacaagccugaagcaggagaugcaaaagggcaaagaucucgcgcugaccugucaguccacgacaucugucuacagcuccuucguguuuaaccuuuucaccccugaaggggccgagggacccacaccccagacccagcaucaacugaaggcucucugcagccuggccgcugagggcauguggaccgacacauuugaauuuugcgaggaugaccugcggagaaaugggguggucgaugccgacaucccugcccuucucggaacgaaaauucugcugaaguauggcgaacgcgagucuuccuacguuuuucuccacguguguauccaggaauuuugcgcugcgcuguuuuaucuucugaaaagccaccucgaucauccgcaccccgccgugcgguguguccaggagcugcugguggcuaacuucgagaaggccagacgcgcccauuggaucuuccuugggugcuuucucaccggacugcugaauaagaaagaacaggagaagcucgacgcuuucuuuggcuuccaacugucucaggaaauuaaacagcagauccaccaaugucuuaagagccugggcgagcgggggaacccucagggacagguugauucccucgccauuuucuacugccuguucgaaaugcaagaccccgcguuugugaaacaggcugucaaucugcuucaggaggccaacuuccacaucauugauaauguggaccucguugugucugccuauugucugaaguacugcagcucccugagaaagcucuguuuuagcguccagaacguguucaaaaaggaggacgaacauucuuccacaagcgauuauucucugaucugcuggcaccauaucuguuccguccuuaccacaagcggccaucugcgcgagcuccaagugcaggacuccacccugucugaaagcacguuuguuacauggugcaaucagcugcggcacccuuccugcagacuucagaaacucgggauuaacaacgugucuuucagcggacaauccguccugcuguuugaggugcuuuucuaccagcccgaucugaaguaccuuagcuucacccugaccaaacucucucgcgacgauauccggucccugugugacgcucugaauuauccggccggcaacguuaaggaacuugcucuggugaauugccaccucagcccuauugauugugagguccuggccgggcuccugacaaacaauaaaaagcugaccuaccugaacgugucuugcaaucagcucgacacaggagugccccugcugugugaggcgcuuugcuccccugauacgguucuggucuaucucaugcuggccuuuugucaccucagcgaacagugcugugaguacaucucugaaaugcugcuuagaaacaagagcgugcgguaucuggaccucuccgcuaaugugcugaaagaugagggccugaagacccuuugcgaggcccugaaacaucccgacuguugccucgauagccugugccucgucaaguguuucauuacagcugccggcugcgaagaccuggcgucugcccuuaucuccaaccaaaaucugaaaauucugcagaucggguguaacgagaucggagacgugggcguucagcuccugugccgcgcucuuacccacacagauuguagacuggaaauucucgggcuggaggaaugcggacucaccagcacguguugcaaggaccuggccuccgugcuuaccuguucuaagacacugcaacagcugaaucucacccugaacacacuugaucauaccggcgucgugguucugugcgaggcucuccggcacccugagugugcccuucaggugcucgggcugagaaaaacggacuuugaugaagagacacaggcccuucugaccgcugaagaggaacgcaaucccaaccugacaaucaccgacgauugcgacaccauuacacgggucgagaucuga

SEQ ID NO: 9081 - protein, 1200 aa, Artificial Sequence
  NALP5__Homo_sapiens__P59047
MKVAGGLELGAAALLSASPRALVTLSTGPTCSILPKNPLFPQNLSSQPCIKMEGDKSLTFSSYGLQWCLYELDKEEFQTFKELLKKKSSESTTCSIPQFEIENANVECLALLLHEYYGASLAWATSISIFENMNLRTLSEKARDDMKRHSPEDPEATMTDQGPSKEKVPGISQAVQQDSATAAETKEQEISQAMEQEGATAAETEEQEISQAMEQEGATAAETEEQGHGGDTWDYKSHVMTKFAEEEDVRRSFENTAADWPEMQTLAGAFDSDRWGFRPRTVVLHGKSGIGKSALARRIVLCWAQGGLYQGMFSYVFFLPVREMQRKKESSVTEFISREWPDSQAPVTEIMSRPERLLFIIDGFDDLGSVLNNDTKLCKDWAEKQPPFTLIRSLLRKVLLPESFLIVTVRDVGTEKLKSEVVSPRYLLVRGISGEQRIHLLLERGIGEHQKTQGLRAIMNNRELLDQCQVPAVGSLICVALQLQDVVGESVAPFNQTLTGLHAAFVFHQLTPRGVVRRCLNLEERVVLKRFCRMAVEGVWNRKSVFDGDDLMVQGLGESELRALFHMNILLPDSHCEEYYTFFHLSLQDFCAALYYVLEGLEIEPALCPLYVEKTKRSMELKQAGFHIHSLWMKRFLFGLVSEDVRRPLEVLLGCPVPLGVKQKLLHWVSLLGQQPNATTPGDTLDAFHCLFETQDKEFVRLALNSFQEVWLPINQNLDLIASSFCLQHCPYLRKIRVDVKGIFPRDESAEACPVVPLWMRDKTLIEEQWEDFCSMLGTHPHLRQLDLGSSILTERAMKTLCAKLRHPTCKIQTLMFRNAQITPGVQHLWRIVMANRNLRSLNLGGTHLKEEDVRMACEALKHPKCLLESLRLDCCGLTHACYLKISQILTTSPSLKSLSLAGNKVTDQGVMPLSDALRVSQCALQKLILEDCGITATGCQSLASALVSNRSLTHLCLSNNSLGNEGVNLLCRSMRLPHCSLQRLMLNQCHLDTAGCGFLALALMGNSWLTHLSLSMNPVEDNGVKLLCEVMREPSCHLQDLELVKCHLTAACCESLSCVISRSRHLKSLDLTDNALGDGGVAALCEGLKQKNSVLARLGLKACGLTSDCCEALSLALSCNRHLTSLNLVQNNFSPKGMMKLCSAFACPTSNLQIIGLWKWQYPVQIRKLLEEVQLLKPRVVIDGSWHSFDEDDRYWWKN

SEQ ID NO: 9082 - RNA, 3603 nt, Artificial Sequence
  NALP5__Homo_sapiens__CCDS12938.1
augaagguugcaggaggacuugaacuuggagcugcugcucugcucucagcaucaccacgugcucuugucacucuuuccacagguccuacuugcucuauauuaccaaagaauccacuuuucccccaaaaccugagcucucagccuuguaucaagauggaaggagacaaaucgcucaccuuuuccagcuacgggcugcaauggugucucuaugagcuagacaaggaagaauuucagacauucaaggaauuacuaaagaagaaaucuucagaaucgaccacaugcucuauuccacaguuugaaaucgagaaugccaacguggaaugucuggcacuccucuugcaugaguauuauggagcaucgcuggccugggcuacguccauuagcaucuuugaaaacaugaaccugcgaacccucucggagaaggcacgggaugacaugaaaagacauucaccagaagauccugaagcaacgaugacugaccaaggaccaagcaaggaaaaagugccaggaauuucacaagcugugcaacaagauagugccacagcugcagagacaaaagaacaagaaauuucacaagcuauggaacaagaaggugccacagcagcagagacagaagaacaagaaauuucacaagcuauggaacaagaaggugccacagcagcagagacagaagaacaaggacauggaggugacacaugggacuacaagagucacgugaugaccaaauucgcugaggaggaggauguacgucguaguuuugaaaacacugcugcugacuggccggaaaugcaaacguuggcuggugcuuuugauucagaccgguggggcuuccggccucgcacggugguucugcacggaaagucaggaauugggaaaucggcucuagccagaaggaucgugcugugcugggcgcaagguggacucuaccagggaauguucuccuacgucuucuuccuccccguuagagagaugcagcggaagaaggagagcagugucacagaguucaucuccagggaguggccagacucccaggcuccggugacggagaucaugucccgaccagaaaggcuguuguucaucauugacgguuucgaugaccugggcucuguccucaacaaugacacaaagcucugcaaagacugggcugagaagcagccuccguucacccucauacgcagucugcugaggaagguccugcucccugaguccuuccugaucgucaccgucagagacgugggcacagagaagcucaagucagaggucgugucuccccguuaccuguuaguuagaggaaucuccggggaacaaagaauccacuugcuccuugagcgcgggauuggugagcaucagaagacacaaggguugcgugcgaucaugaacaaccgugagcugcucgaccagugccaggugcccgccgugggcucucucaucugcguggcccugcagcugcaggacguggugggggagagcgucgcccccuucaaccaaacgcucacaggccugcacgccgcuuuuguguuucaucagcucaccccucgaggcgugguccggcgcugucucaaucuggaggaaagaguuguccugaagcgcuucugccguauggcuguggagggaguguggaauaggaagucaguguuugacggugacgaccucaugguucaaggacucggggagucugagcuccgugcucuguuucacaugaacauccuucucccagacagccacugugaggaguacuacaccuucuuccaccucagucuccaggacuucugugccgccuuguacuacguguuagagggccuggaaaucgagccagcucucugcccucuguacguugagaagacaaagagguccauggagcuuaaacaggcaggcuuccauauccacucgcuuuggaugaagcguuucuuguuuggccucgugagcgaagacguaaggaggccacuggagguccugcugggcugucccguuccccugggggugaagcagaagcuucugcacugggucucucuguugggucagcagccuaaugccaccaccccaggagacacccuggacgccuuccacugucuuuucgagacucaagacaaagaguuuguucgcuuggcauuaaacagcuuccaagaaguguggcuuccgauuaaccagaaccuggacuugauagcaucuuccuucugccuccagcacuguccguauuugcggaaaauucggguggaugucaaagggaucuucccaagagaugaguccgcugaggcauguccuguggucccucuauggaugcgggauaagacccucauugaggagcagugggaagauuucugcuccaugcuuggcacccacccacaccugcggcagcuggaccugggcagcagcauccugacagagcgggccaugaagacccugugugccaagcugaggcaucccaccugcaagauacagacccugauguuuagaaaugcacagauuaccccuggugugcagcaccucuggagaaucgucauggccaaccguaaccuaagaucccucaacuugggaggcacccaccugaaggaagaggauguaaggauggcgugugaagccuuaaaacacccaaaauguuuguuggagucuuugaggcuggauugcuguggauugacccaugccuguuaccugaagaucucccaaauccuuacgaccucccccagccugaaaucucugagccuggcaggaaacaaggugacagaccagggaguaaugccucucagugaugccuugagagucucccagugcgcccugcagaagcugauacuggaggacuguggcaucacagccacggguugccagagucuggccucagcccucgucagcaaccggagcuugacacaccugugccuauccaacaacagccuggggaacgaagguguaaaucuacugugucgauccaugaggcuuccccacuguagucugcagaggcugaugcugaaucagugccaccuggacacggcuggcugugguuuucuugcacuugcgcuuauggguaacucauggcugacgcaccugagccuuagcaugaacccuguggaagacaauggcgugaagcuucugugcgaggucaugagagaaccaucuugucaucuccaggaccuggaguugguaaagugucaucucaccgccgcgugcugugagagucuguccugugugaucucgaggagcagacaccugaagagccuggaucucacggacaaugcccugggugacggugggguugcugcgcugugcgagggacugaagcaaaagaacaguguucuggcgagacucggguugaaggcauguggacugacuucugauugcugugaggcacucuccuuggcccuuuccugcaaccggcaucugaccagucuaaaccuggugcagaauaacuucagucccaaaggaaugaugaagcuguguucggccuuugccugucccacgucuaacuuacagauaauugggcuguggaaauggcaguacccugugcaaauaaggaagcugcuggaggaagugcagcuacucaagccccgagucguaauugacgguaguuggcauucuuuugaugaagaugaccgguacugguggaaaaacuga

SEQ ID NO: 9083 - RNA, 3603 nt, Artificial Sequence
  derived and/or modified sequence opt1 from NALP5__Homo_sapiens__CCDS12938.1
augaagguggccggcgggcuggagcucggcgccgcggcccugcugagcgccagcccccgcgcccucgucacccugagcaccgggccgacgugcuccauccugcccaagaacccccucuucccccagaaccugagcucccagccgugcaucaagauggagggcgacaagagccugaccuucuccagcuacgggcuccaguggugccuguacgagcuggacaaggaggaguuccagaccuucaaggagcuccugaagaagaaguccagcgaguccaccacgugcagcaucccccaguucgagaucgagaacgccaacguggagugccuggcgcuccugcugcacgaguacuacggcgccucccucgccugggccaccagcaucuccaucuucgagaacaugaaccugcggacccugagcgagaaggcgcgcgacgacaugaagcggcacucccccgaggaccccgaggccaccaugacggaccagggcccgagcaaggagaaggugcccgggaucucccaggccguccagcaggacagcgccaccgccgcggagaccaaggagcaggagaucagccaggccauggagcaggagggcgccaccgccgccgagacggaggagcaggagaucucccaggcgauggagcaggagggggccaccgccgccgagaccgaggagcagggccacgggggcgacaccugggacuacaagagccacgugaugacgaaguucgccgaggaggaggacgugcgccgguccuucgagaacaccgcggccgacuggcccgagaugcagacccucgccggcgccuucgacagcgaccgcuggggguuccggccccgcaccgucgugcugcacggcaaguccgggaucggcaagagcgcccuggcgcggcgcaucgugcucugcugggcccagggcgggcuguaccagggcauguucuccuacgucuucuuccugccggugcgggagaugcagcgcaagaaggagagcuccgugacggaguucaucagccgggaguggcccgacucccaggcccccgucaccgagaucaugagccgccccgagcggcuccuguucaucaucgacggguucgacgaccugggcuccgugcucaacaacgacaccaagcugugcaaggacugggccgagaagcagccgcccuucacccugauccgcagccuccugcggaaggugcugcuccccgaguccuuccugaucgucacggugcgcgacguggggaccgagaagcugaaguccgaggucgugagcccccgguaccuccuggugcgcggcaucagcggcgagcagcggauccaccuccugcuggagcgcgggaucggcgagcaccagaagacccaggggcugcgcgcgaucaugaacaaccgggagcuccuggaccagugccaggucccggccgugggcucccugaucugcguggcccuccagcugcaggacgucgugggggagagcgucgcccccuucaaccagacccugacgggccugcacgccgcguucguguuccaccagcucacgccccgcggcgugguccggcgcugccugaaccuggaggagcggguggugcucaagcgcuucugccggauggccgucgaggggguguggaaccgcaagagcguguucgacggcgacgaccugaugguccaggggcugggcgaguccgagcuccgggcccuguuccacaugaacauccugcuccccgacagccacugcgaggaguacuacaccuucuuccaccugucccugcaggacuucugcgccgcccucuacuacgugcuggaggggcuggagaucgagccggcgcucugcccccuguacguggagaagaccaagcgcagcauggagcugaagcaggccggcuuccacauccacucccucuggaugaagcgguuccuguucggccuggucagcgaggacgugcgccggccccucgaggugcugcuggggugccccgucccgcucggcgugaagcagaagcugcugcacugggugucccuccuggggcagcagcccaacgccaccacccccggcgacacccuggacgccuuccacugccucuucgagacccaggacaaggaguucguccgccuggcccugaacagcuuccaggagguguggcucccgaucaaccagaaccuggaccugaucgcguccagcuucugccuccagcacugccccuaccugcggaagauccgcguggacgucaagggcaucuucccccgggacgaguccgccgaggccugccccguggugccgcuguggaugcgcgacaagacgcucaucgaggagcagugggaggacuucugcagcaugcuggggacccacccccaccuccggcagcuggaccugggcuccagcauccugaccgagcgcgccaugaagacccucugcgcgaagcugcgccacccgaccugcaagauccagacgcugauguuccggaacgcccagaucacccccgggguccagcaccucuggcgcaucgugauggccaaccggaaccugcgcucccugaaccucggcgggacccaccugaaggaggaggacgugcggauggccugcgaggcccugaagcaccccaagugccuccuggagagccugcgccucgacugcugcggccugacccacgcgugcuaccugaagaucucccagauccucacgaccagccccagccugaagucccugagccucgccggcaacaaggucaccgaccagggggugaugccccuguccgacgcccugcgggugagccagugcgcccuccagaagcugauccuggaggacugcggcaucaccgccacggggugccagucccucgcgagcgcccuggucuccaaccgcagccugacccaccucugccuguccaacaacagccugggcaacgagggggugaaccuccugugccgguccaugcgccugccccacugcagccuccagcggcugaugcugaaccagugccaccucgacaccgccggcugcggcuuccuggcccuggcccucauggggaacuccuggcugacccaccugagccucuccaugaacccgguggaggacaacggcgucaagcugcugugcgaggugaugcgcgagcccagcugccaccuccaggaccuggagcuggugaagugccaccucacggcggccugcugcgagucccugagcugcgucaucucccggagccgccaccugaagucccuggaccucaccgacaacgcccugggggacggcgggguggccgcgcugugcgagggccucaagcagaagaacuccgugcuggcccggcugggccucaaggccugcgggcugaccagcgacugcugcgaggcccugucccucgcccugagcugcaaccgccaccugaccucccucaaccugguccagaacaacuucagccccaagggcaugaugaagcugugcuccgcguucgccugccccacgagcaaccuccagaucaucgggcuguggaaguggcaguacccggugcagauccggaagcugcucgaggaggugcagcugcugaagccccgcgucgugaucgacggcuccuggcacagcuucgacgaggacgaccgguacugguggaagaacuga

SEQ ID NO: 9084 - RNA, 3603 nt, Artificial Sequence
  derived and/or modified sequence opt2 from NALP5__Homo_sapiens__CCDS12938.1
augaaggucgccggcggccucgagcucggcgccgccgcccuccucuccgccuccccccgcgcccucgucacccucuccaccggccccaccugcuccauccuccccaagaacccccucuucccccagaaccucuccucccagcccugcaucaagauggagggcgacaagucccucaccuucuccuccuacggccuccaguggugccucuacgagcucgacaaggaggaguuccagaccuucaaggagcuccucaagaagaaguccuccgaguccaccaccugcuccaucccccaguucgagaucgagaacgccaacgucgagugccucgcccuccuccuccacgaguacuacggcgccucccucgccugggccaccuccaucuccaucuucgagaacaugaaccuccgcacccucuccgagaaggcccgcgacgacaugaagcgccacucccccgaggaccccgaggccaccaugaccgaccagggccccuccaaggagaagguccccggcaucucccaggccguccagcaggacuccgccaccgccgccgagaccaaggagcaggagaucucccaggccauggagcaggagggcgccaccgccgccgagaccgaggagcaggagaucucccaggccauggagcaggagggcgccaccgccgccgagaccgaggagcagggccacggcggcgacaccugggacuacaagucccacgucaugaccaaguucgccgaggaggaggacguccgccgcuccuucgagaacaccgccgccgacuggcccgagaugcagacccucgccggcgccuucgacuccgaccgcuggggcuuccgcccccgcaccgucguccuccacggcaaguccggcaucggcaaguccgcccucgcccgccgcaucguccucugcugggcccagggcggccucuaccagggcauguucuccuacgucuucuuccuccccguccgcgagaugcagcgcaagaaggaguccuccgucaccgaguucaucucccgcgaguggcccgacucccaggcccccgucaccgagaucaugucccgccccgagcgccuccucuucaucaucgacggcuucgacgaccucggcuccguccucaacaacgacaccaagcucugcaaggacugggccgagaagcagccccccuucacccucauccgcucccuccuccgcaagguccuccuccccgaguccuuccucaucgucaccguccgcgacgucggcaccgagaagcucaaguccgaggucgucuccccccgcuaccuccucguccgcggcaucuccggcgagcagcgcauccaccuccuccucgagcgcggcaucggcgagcaccagaagacccagggccuccgcgccaucaugaacaaccgcgagcuccucgaccagugccagguccccgccgucggcucccucaucugcgucgcccuccagcuccaggacgucgucggcgaguccgucgcccccuucaaccagacccucaccggccuccacgccgccuucgucuuccaccagcucaccccccgcggcgucguccgccgcugccucaaccucgaggagcgcgucguccucaagcgcuucugccgcauggccgucgagggcgucuggaaccgcaaguccgucuucgacggcgacgaccucaugguccagggccucggcgaguccgagcuccgcgcccucuuccacaugaacauccuccuccccgacucccacugcgaggaguacuacaccuucuuccaccucucccuccaggacuucugcgccgcccucuacuacguccucgagggccucgagaucgagcccgcccucugcccccucuacgucgagaagaccaagcgcuccauggagcucaagcaggccggcuuccacauccacucccucuggaugaagcgcuuccucuucggccucgucuccgaggacguccgccgcccccucgagguccuccucggcugccccgucccccucggcgucaagcagaagcuccuccacugggucucccuccucggccagcagcccaacgccaccacccccggcgacacccucgacgccuuccacugccucuucgagacccaggacaaggaguucguccgccucgcccucaacuccuuccaggaggucuggcuccccaucaaccagaaccucgaccucaucgccuccuccuucugccuccagcacugccccuaccuccgcaagauccgcgucgacgucaagggcaucuucccccgcgacgaguccgccgaggccugccccgucgucccccucuggaugcgcgacaagacccucaucgaggagcagugggaggacuucugcuccaugcucggcacccacccccaccuccgccagcucgaccucggcuccuccauccucaccgagcgcgccaugaagacccucugcgccaagcuccgccaccccaccugcaagauccagacccucauguuccgcaacgcccagaucacccccggcguccagcaccucuggcgcaucgucauggccaaccgcaaccuccgcucccucaaccucggcggcacccaccucaaggaggaggacguccgcauggccugcgaggcccucaagcaccccaagugccuccucgagucccuccgccucgacugcugcggccucacccacgccugcuaccucaagaucucccagauccucaccaccucccccucccucaagucccucucccucgccggcaacaaggucaccgaccagggcgucaugccccucuccgacgcccuccgcgucucccagugcgcccuccagaagcucauccucgaggacugcggcaucaccgccaccggcugccagucccucgccuccgcccucgucuccaaccgcucccucacccaccucugccucuccaacaacucccucggcaacgagggcgucaaccuccucugccgcuccaugcgccucccccacugcucccuccagcgccucaugcucaaccagugccaccucgacaccgccggcugcggcuuccucgcccucgcccucaugggcaacuccuggcucacccaccucucccucuccaugaaccccgucgaggacaacggcgucaagcuccucugcgaggucaugcgcgagcccuccugccaccuccaggaccucgagcucgucaagugccaccucaccgccgccugcugcgagucccucuccugcgucaucucccgcucccgccaccucaagucccucgaccucaccgacaacgcccucggcgacggcggcgucgccgcccucugcgagggccucaagcagaagaacuccguccucgcccgccucggccucaaggccugcggccucaccuccgacugcugcgaggcccucucccucgcccucuccugcaaccgccaccucaccucccucaaccucguccagaacaacuucucccccaagggcaugaugaagcucugcuccgccuucgccugccccaccuccaaccuccagaucaucggccucuggaaguggcaguaccccguccagauccgcaagcuccucgaggagguccagcuccucaagccccgcgucgucaucgacggcuccuggcacuccuucgacgaggacgaccgcuacugguggaagaacuga

SEQ ID NO: 9085 - RNA, 3603 nt, Artificial Sequence
  derived and/or modified sequence opt3 from NALP5__Homo_sapiens__CCDS12938.1
augaagguggccggcgggcuggagcucggagcugcagcccuucugagcgcgucccccagagcuuuggucaccuuaucuacagguccuacuugcucaauccugcccaaaaacccgcuauucccccagaaucucaguagccaaccuuguauuaagauggaaggcgacaaaucccugacguuuucuucguacgggcuucaguggugccuguaugaguuggauaaggaagaguuccagaccuuuaaagaacuccugaagaagaaaucaagcgagaguacaacuuguuccauaccacaguucgagaucgaaaacgccaauguugagugccuggcacucuuacugcacgaauacuauggagccucucuugcuugggcaaccagcauuuccaucuuugagaacaugaauuugaggacacugucagagaaggcccgggacgauaugaaacgccauagucccgaagacccugaggcuaccaugacugaucaaggcccaagcaaggaaaaagugcccgguauuucucaggccguacagcaggacuccgcgacagcagccgagaccaaggaacaagagaucucacaggcuauggagcaggaaggggccacggcagcugagacugaagaacaggaaauaagccaagccauggagcaggagggagcgaccgccgcagaaacagaggaacagggccacggcggggauacuugggacuacaagagucaugugaugaccaaauucgcugaggaagaggauguccgacguucuuuugagaacacagccgcugacuggccugaaaugcaaacccuagccggagcauucgauuccgacagaugggguuuuaggccacggacggugguucuccacggcaagagcgggaucggaaaaucggcccuggcucgcagaauugugcuuuguugggcgcagggcggucuguaucaggggauguucucuuacgucuuuuucuugccggugagggagaugcagcggaagaaagaauccucaguaacugaguuuaucagucgcgaguggcccgauagccaagcaccuguuacagaaauuaugucccgaccagagagacuccuguucaucauagacggauucgacgauuuaggcucugugcugaauaacgacaccaagcucugcaaagauugggccgaaaagcagcccccuuuuacucuuauuaggagccuguugcggaagguccuacugccagagucauuccucaucgugacagugcgugacgucggcaccgaaaaacugaagagugagguuguguccccacgcuaucuucugguaagagggauuagcggagagcagaggauccauuugcuccuggaacgggguaucggcgagcaccagaaaacgcaaggguuacgagcuauuaugaauaaccgcgaacugcuagaucagugucaggugccggccgucggaucucucauaugcguggcacugcagcuucaagacguugugggcgagucagucgccccuuuuaaucagaccuugacaggucugcacgcugccuucguguuucaucagcucacucccagagggguaguuaggcggugucugaaccuugaagaacgcgugguccugaagagauucugcaggauggcaguggagggcgucuggaaucguaaaaguguguuugauggagacgauuugaugguucagggccucggggaaagcgagcugcgggcguuauuccacaugaacauccugcuaccagacucccauugugaagaguacuacaccuuuuuccaccucucucugcaagauuuuugcgcugcccuuuauuacguguuggaaggacuggagauugagccugcacucugcccccuguauguagaaaagacaaagcgaucgauggaguuaaaacaggccgguuuccacauccauagccuguggaugaagagauuucuuuucggcuuggucuccgaagacgugaggcgcccacucgagguucugcuagggugucccgugccucugggagucaaacagaagcuccugcacugggugucacuuuugggccaacagccaaaugcuacuaccccgggugacacacuggaugccuuccauugcuuauuugagacccaggacaaagaguucguacggcucgcacugaacaguuuucaggagguguggcuucccauaaaccaaaaucuggauuugauugcuucuagcuucugucuccagcacugcccuuaccugagaaagaucaggguugacgucaaggggaucuuuccacgcgaugaauccgccgaggcgugucccguggugccucuauggaugcgagacaaaacucugauugaggagcagugggaggauuucugcucaaugcucggcacgcauccacaucugcggcagcuugacuugggaagcucuauccugacagaacgugccaugaagaccuuaugugcuaaacucagacaccccacuugcaagauucaaacccugauguuuaggaacgcacagauaacaccgggcguccagcaccuuuggcgcaucguuauggccaaucggaaccugagaucccuaaaucucgggggaacccaccugaaagaggaagaugugaggauggcuugugaggccuugaagcauccuaagugccuguuagaaagucuccgacuggacuguugcggucuuacucacgcaugcuaucugaaaauuagccagaucuugacaacgucuccaucccucaagucacugagucuagcgggcaacaaagugaccgaucaagggguaaugccccugagcgacgcccuucgcgucucgcagugugcucuccagaagcugaucuuggaggauugcggaauuacugccacaggcugucaaucccuggcaucugcuuuagugagcaaucggucacucacccaccugugccuuaguaacaauucccuggguaacgaggggguuaauuugcucuguagaucuaugaggcugccucauugcagccuacagcgucugaugcuuaaccagugucaccucgacacagccggcugcggauuccuggcauuggccuuaaugggcaauuccuggcugacucaucucucacugagcaugaaccccguggaagacaauggggucaaacuucugugugaggugaugcgcgaaccaaguugccacuugcaggaucuagagcugguuaagugucaucucaccgcugcgugcugcgaaucucuguccugugugauaagccggucgagacaccuuaaaucauuagaccugacggauaacgcccucggagacggcgguguagcagcuuugugcgaggggcugaagcaaaagaacucuguccucgccaggcugggacuuaaagccuguggccugaccagugauugcugugaggcuuugucccuagcacugagcugcaaucgacaccucacaucuuuaaaccuggugcagaauaacuuuagcccuaaggguaugaugaaacuuuguuccgccuucgcgugccccacuucaaaucugcagaucauuggccucuggaaguggcaguacccagugcaaauccggaaauugcuggaagagguccagcuccugaagccgcgcguugugauugacgggaguuggcauagcuuugaugaagacgauagauauugguggaagaacuga

SEQ ID NO: 9086 - RNA, 3603 nt, Artificial Sequence
  derived and/or modified sequence opt4 from NALP5__Homo_sapiens__CCDS12938.1
augaagguggccggcggccuggagcugggcgccgccgcccugcugagcgccagccccagagcccuggugacccugagcaccggccccaccugcagcauccugcccaagaacccccuguucccccagaaccugagcagccagcccugcaucaagauggagggcgacaagagccugaccuucagcagcuacggccugcaguggugccuguacgagcuggacaaggaggaguuccagaccuucaaggagcugcugaagaagaagagcagcgagagcaccaccugcagcaucccccaguucgagaucgagaacgccaacguggagugccuggcccugcugcugcacgaguacuacggcgccagccuggccugggccaccagcaucagcaucuucgagaacaugaaccugagaacccugagcgagaaggccagagacgacaugaagagacacagccccgaggaccccgaggccaccaugaccgaccagggccccagcaaggagaaggugcccggcaucagccaggccgugcagcaggacagcgccaccgccgccgagaccaaggagcaggagaucagccaggccauggagcaggagggcgccaccgccgccgagaccgaggagcaggagaucagccaggccauggagcaggagggcgccaccgccgccgagaccgaggagcagggccacggcggcgacaccugggacuacaagagccacgugaugaccaaguucgccgaggaggaggacgugagaagaagcuucgagaacaccgccgccgacuggcccgagaugcagacccuggccggcgccuucgacagcgacagauggggcuucagacccagaaccguggugcugcacggcaagagcggcaucggcaagagcgcccuggccagaagaaucgugcugugcugggcccagggcggccuguaccagggcauguucagcuacguguucuuccugcccgugagagagaugcagagaaagaaggagagcagcgugaccgaguucaucagcagagaguggcccgacagccaggcccccgugaccgagaucaugagcagacccgagagacugcuguucaucaucgacggcuucgacgaccugggcagcgugcugaacaacgacaccaagcugugcaaggacugggccgagaagcagccccccuucacccugaucagaagccugcugagaaaggugcugcugcccgagagcuuccugaucgugaccgugagagacgugggcaccgagaagcugaagagcgagguggugagccccagauaccugcuggugagaggcaucagcggcgagcagagaauccaccugcugcuggagagaggcaucggcgagcaccagaagacccagggccugagagccaucaugaacaacagagagcugcuggaccagugccaggugcccgccgugggcagccugaucugcguggcccugcagcugcaggacguggugggcgagagcguggcccccuucaaccagacccugaccggccugcacgccgccuucguguuccaccagcugacccccagaggcguggugagaagaugccugaaccuggaggagagaguggugcugaagagauucugcagaauggccguggagggcguguggaacagaaagagcguguucgacggcgacgaccugauggugcagggccugggcgagagcgagcugagagcccuguuccacaugaacauccugcugcccgacagccacugcgaggaguacuacaccuucuuccaccugagccugcaggacuucugcgccgcccuguacuacgugcuggagggccuggagaucgagcccgcccugugcccccuguacguggagaagaccaagagaagcauggagcugaagcaggccggcuuccacauccacagccuguggaugaagagauuccuguucggccuggugagcgaggacgugagaagaccccuggaggugcugcugggcugccccgugccccugggcgugaagcagaagcugcugcacugggugagccugcugggccagcagcccaacgccaccacccccggcgacacccuggacgccuuccacugccuguucgagacccaggacaaggaguucgugagacuggcccugaacagcuuccaggagguguggcugcccaucaaccagaaccuggaccugaucgccagcagcuucugccugcagcacugccccuaccugagaaagaucagaguggacgugaagggcaucuuccccagagacgagagcgccgaggccugccccguggugccccuguggaugagagacaagacccugaucgaggagcagugggaggacuucugcagcaugcugggcacccacccccaccugagacagcuggaccugggcagcagcauccugaccgagagagccaugaagacccugugcgccaagcugagacaccccaccugcaagauccagacccugauguucagaaacgcccagaucacccccggcgugcagcaccuguggagaaucgugauggccaacagaaaccugagaagccugaaccugggcggcacccaccugaaggaggaggacgugagaauggccugcgaggcccugaagcaccccaagugccugcuggagagccugagacuggacugcugcggccugacccacgccugcuaccugaagaucagccagauccugaccaccagccccagccugaagagccugagccuggccggcaacaaggugaccgaccagggcgugaugccccugagcgacgcccugagagugagccagugcgcccugcagaagcugauccuggaggacugcggcaucaccgccaccggcugccagagccuggccagcgcccuggugagcaacagaagccugacccaccugugccugagcaacaacagccugggcaacgagggcgugaaccugcugugcagaagcaugagacugccccacugcagccugcagagacugaugcugaaccagugccaccuggacaccgccggcugcggcuuccuggcccuggcccugaugggcaacagcuggcugacccaccugagccugagcaugaaccccguggaggacaacggcgugaagcugcugugcgaggugaugagagagcccagcugccaccugcaggaccuggagcuggugaagugccaccugaccgccgccugcugcgagagccugagcugcgugaucagcagaagcagacaccugaagagccuggaccugaccgacaacgcccugggcgacggcggcguggccgcccugugcgagggccugaagcagaagaacagcgugcuggccagacugggccugaaggccugcggccugaccagcgacugcugcgaggcccugagccuggcccugagcugcaacagacaccugaccagccugaaccuggugcagaacaacuucagccccaagggcaugaugaagcugugcagcgccuucgccugccccaccagcaaccugcagaucaucggccuguggaaguggcaguaccccgugcagaucagaaagcugcuggaggaggugcagcugcugaagcccagaguggugaucgacggcagcuggcacagcuucgacgaggacgacagauacugguggaagaacuga

SEQ ID NO: 9087 - RNA, 3603 nt, Artificial Sequence
  derived and/or modified sequence opt5 from NALP5__Homo_sapiens__CCDS12938.1
augaagguggccggcgggcuggagcucggagcugccgcgcugcuuagcgcuucccccagagcccuggucacccucucuacaggcccuacgugcagcauccugccgaaaaacccccuuuucccucagaaucuguccucucaacccuguauuaagauggaaggggacaaaagccucaccuuuuccucuuacggacugcaguggugccuguaugagcucgauaaggaagaguuccagacauuuaaagaacugcuuaagaagaaaagcuccgagagcaccacauguucuaucccucaguucgagauugaaaacgccaauguugagugccuggcucuccugcuucacgaauacuauggcgccucccuggcuugggccaccagcaucucuauuuuugagaacaugaaucuccggacacuguccgagaaggcgcgcgacgauaugaaaagacauagccccgaagacccugaggccaccaugacggaucaagggccgucuaaggaaaaagugcccggaaucucccaggcugugcagcaggacagcgccaccgcugccgagacaaaggaacaagagaucucccaggcgauggagcaggaaggcgccaccgcugccgagacagaagaacaggaaauuucucaagcuauggagcaggagggcgccaccgccgcugaaacggaggaacaggggcacggaggcgauacaugggacuacaagagccaugucaugaccaaauucgcggaggaagaggaugugcggcgcuccuuugagaacacagccgcugacuggccugaaaugcaaacccuggccggggccuucgauagcgacagauggggauuucggccccgcaccguugugcuccacggcaagucugggaucggaaaauccgcucuggccagacggauuguccuuuguugggcgcagggcggccuguaucaggggauguucagcuacguguuuuuccucccuguucgcgagaugcagagaaagaaagaaucuagcgugacagaguuuaucucccgggaguggcccgauucucaagcuccggucacggaaauuaugagccgcccugagagacugcuuuucaucauugacggauucgacgaucugggcuccgugcucaauaacgacaccaagcugugcaaagauugggccgaaaagcagcccccuuuuacacugauccggagccuccugcgcaaggugcuucugcccgagucuuuccucaucgucaccguuagagacguggggacagaaaaacugaaguccgagguggucagcccccgguaucuucuggugagaggaauuucuggcgagcagcgcauccaucuccugcuggaacgggggauuggagagcaccagaaaacccaaggccucagagccaucaugaauaaccgcgaacugcuugaucagugucagguuccugcugugggcucccugauuugcgucgcccuccagcugcaagacgugguuggggagagcguggcuccguuuaaucagacgcugacaggacuucacgccgcguucgucuuucaucagcucacaccccggggcguggucagacgcugucugaaccuggaagaacgggugguucucaagagauucugccgcauggccguggagggggucuggaaucggaaauccguguuugauggagacgaucugaugguucagggccuuggggaaucugagcugagagcucucuuccacaugaacauccugcugccugacagccauugugaagaguacuacaccuuuuuccaccuuucccuccaagauuuuugcgccgcucuguauuacgugcuggaaggccucgagaucgagcccgcccugugcccucuuuaugucgaaaagaccaagcgcucuauggagcugaaacaggcgggauuccacauucauagccucuggaugaagcgguuucuguucggccugguguccgaagacgugagacggccccuugagguucuccugggguguccggucccucugggagugaaacagaagcuccugcacugggugagccuucugggccaacagcccaaugccaccacaccuggggacacgcucgaugcuuuccauugccuguuugagacccaggacaaagaguucguccgccuggcccuuaacucuuuucaggagguguggcuccccaucaaccaaaaucuggaucugauugcuuccagcuucugucuccagcacugcccuuaccugagaaagauccggguugacgugaagggaauuuuucccagagaugaaucugccgaggccuguccggucgugccucuuuggaugcgcgacaaaacacugaucgaggagcagugggaggauuucugcuccaugcucggcacccauccccaucugcggcagcuggaccuugggagcucuauccugacagaaagagcuaugaagacccucugugcgaaacugcgccaccccacgugcaagauucaaacccucauguuuagaaacgcccagaucacaccuggcguucagcaccuguggcggauugugauggcuaaucgcaaccuuagaagccugaaucucggaggcacccaccugaaagaggaagauguccggauggccugugaggcccugaagcauccgaagugccuucuggaaucccuccgccuggacuguugcgggcucacacacgcuugcuaucugaaaaucagccagauucuuaccacgucucccucccucaagagccugucccuggccggaaacaaagugacagaucaaggcguuaugccucugucugacgcgcuuagagugagccagugugcucugcagaagcucauccuggaggauugcgggauuaccgccacaggaugucaaucccucgccucugcucuggucagcaaucggucccuuacccaccugugccugucuaacaauagccucggcaacgagggggugaaucugcuuugucgcuccaugagacugccccauugcagccuccagcggcugaugcucaaccagugucaccuggacaccgccggcugcggauuccuugcgcuggcucugaugggcaauucuuggcucacacaucugucccuuagcaugaacccuguggaagacaauggggucaaacugcucugugagguuaugcgcgaacccucuugccaucugcaggaucucgagcuggugaagugucaccuuacggccgccugcugcgaaucccugagcugugugaucucuagaucccggcaccugaaaagccucgaccugaccgauaacgcucuuggagacggcggggucgccgcucugugcgagggacucaagcaaaagaacuccgugcuggccagacucggccugaaagcgugugggcuuacaagcgauugcugugaggcccugucucuggcucucagcugcaaucgccaccugaccucccuuaaccugguucagaauaacuuuucuccuaagggcaugaugaaacucuguagcgccuucgcuugccccacauccaaucugcagaucauuggacuguggaaguggcaguacccggugcaaauccggaaacuccuugaagagguccagcugcugaagccuagagugguuauugacggcucuuggcauagcuuugaugaagacgaucgcuauugguggaagaacuga

SEQ ID NO: 9088 - protein, 892 aa, Artificial Sequence
  NALP6__Homo_sapiens__P59044
MDQPEAPCSSTGPRLAVARELLLAALEELSQEQLKRFRHKLRDVGPDGRSIPWGRLERADAVDLAEQLAQFYGPEPALEVARKTLKRADARDVAAQLQERRLQRLGLGSGTLLSVSEYKKKYREHVLQLHARVKERNARSVKITKRFTKLLIAPESAAPEEAMGPAEEPEPGRARRSDTHTFNRLFRRDEEGRRPLTVVLQGPAGIGKTMAAKKILYDWAAGKLYQGQVDFAFFMPCGELLERPGTRSLADLILDQCPDRGAPVPQMLAQPQRLLFILDGADELPALGGPEAAPCTDPFEAASGARVLGGLLSKALLPTALLLVTTRAAAPGRLQGRLCSPQCAEVRGFSDKDKKKYFYKYFRDERRAERAYRFVKENETLFALCFVPFVCWIVCTVLRQQLELGRDLSRTSKTTTSVYLLFITSVLSSAPVADGPRLQGDLRNLCRLAREGVLGRRAQFAEKELEQLELRGSKVQTLFLSKKELPGVLETEVTYQFIDQSFQEFLAALSYLLEDGGVPRTAAGGVGTLLRGDAQPHSHLVLTTRFLFGLLSAERMRDIERHFGCMVSERVKQEALRWVQGQGQGCPGVAPEVTEGAKGLEDTEEPEEEEEGEEPNYPLELLYCLYETQEDAFVRQALCRFPELALQRVRFCRMDVAVLSYCVRCCPAGQALRLISCRLVAAQEKKKKSLGKRLQASLGGGSSSQGTTKQLPASLLHPLFQAMTDPLCHLSSLTLSHCKLPDAVCRDLSEALRAAPALTELGLLHNRLSEAGLRMLSEGLAWPQCRVQTVRVQLPDPQRGLQYLVGMLRQSPALTTLDLSGCQLPAPMVTYLCAVLQHQGCGLQTLSLASVELSEQSLQELQAVKRAKPDLVITHPALDGHPQPPKELISTF

SEQ ID NO: 9089 - RNA, 2679 nt, Artificial Sequence
  NALP6__Homo_sapiens__CCDS7693.1
auggaccagccagaggcccccugcuccagcacggggccgcgccucgcgguggcccgcgagcugcuccuggcugcgcuggaggaacugagccaagagcagcugaagcgcuuccgccacaagcugcgcgacgugggcccggacggacgcagcaucccgugggggcggcuggagcgcgcggacgccguggaccucgcggagcagcuggcccaguucuacggcccggagccugcccuggagguggcccgcaagacccucaagagggcggacgcgcgcgacguggcggcgcagcuccaggagcggcggcugcagcggcucgggcucggcuccgggacgcugcucuccguguccgaguacaagaagaaguaccgggagcacgugcugcagcugcacgcucgggugaaggagaggaacgcccgcuccgugaagaucaccaagcgcuucaccaagcugcucaucgcgcccgagagcgccgccccggaggaggcgauggggcccgcggaagagccugagccggggcgcgcgcggcgcucggacacgcacacuuucaaccgccucuuccgccgcgacgaggagggccggcggccgcugaccguggugcugcagggcccggcgggcaucggcaagaccauggcggccaaaaagauccuguacgacugggcggcgggcaagcuguaccagggccagguggacuucgccuucuucaugcccugcggcgagcugcuggagaggccgggcacgcgcagccuggcugaccugauccuggaccagugccccgaccgcggcgcgccggugccgcagaugcuggcccagccgcagcggcugcucuucauccuggacggcgcggacgagcugccggcgcuggggggccccgaggccgcgcccugcacagaccccuucgaggcggcgagcggcgcgcgggugcuaggcgggcugcugagcaaggcgcugcugcccacggcccuccugcuggugaccacgcgcgccgccgcccccgggaggcugcagggccgccuguguuccccgcagugcgccgaggugcgcggcuucuccgacaaggacaagaagaaguauuucuacaaguauuuccgggaugagaggagggccgagcgcgccuaccgcuucgugaaggagaacgagacgcuguucgcgcugugcuucgugcccuucgugugcuggaucgugugcaccgugcugcgccagcagcuggagcucggucgggaccugucgcgcacguccaagaccaccacgucaguguaccugcuuuucaucaccagcguucugagcucggcuccgguagccgacgggccccgguugcagggcgaccugcgcaaucugugccgccuggcccgcgagggcguccucggacgcagggcgcaguuugccgagaaggaacuggagcaacuggagcuucguggcuccaaagugcagacgcuguuucucagcaaaaaggagcugccgggcgugcuggagacagaggucaccuaccaguucaucgaccagagcuuccaggaguuccucgcggcacuguccuaccugcuggaggacggcggggugcccaggaccgcggcuggcggcguugggacacuccugcguggggacgcccagccgcacagccacuuggugcucaccacgcgcuuccucuucggacugcugagcgcggagcggaugcgcgacaucgagcgccacuucggcugcaugguuucagagcgugugaagcaggaggcccugcggugggugcagggacagggacagggcugccccggaguggcaccagaggugaccgagggggccaaagggcucgaggacaccgaagagccagaggaggaggaggagggagaggagcccaacuacccacuggaguugcuguacugccuguacgagacgcaggaggacgcguuugugcgccaagcccugugccgguucccggagcuggcgcugcagcgagugcgcuucugccgcauggacguggcuguucugagcuacugcgugaggugcugcccugcuggacaggcacugcggcugaucagcugcagauugguugcugcgcaggagaagaagaagaagagccuggggaagcggcuccaggccagccuggguggcggcagcaguucucaaggcaccacaaaacaacugccagccucccuucuucauccacucuuucaggcaaugacugacccacugugccaucugagcagccucacgcugucccacugcaaacucccugacgcggucugccgagaccuuucugaggcccugagggcagcccccgcacugacggagcugggccuccuccacaacaggcucagugaggcgggacugcguaugcugagugagggccuagccuggccgcagugcagggugcagacggucaggguacagcugccugacccccagcgagggcuccaguaccugguggguaugcuucggcagagcccugcccugaccacccuggaucucagcggcugccaacugcccgcccccauggugaccuaccugugugcaguccugcagcaccagggaugcggccugcagacccucagucuggccucuguggagcugagcgagcagucacuacaggagcuucaggcugugaagagagcaaagccggaucuggucaucacacacccagcgcuggacggccacccacaaccucccaaggaacucaucucgaccuucuga

SEQ ID NO: 9090 - RNA, 2679 nt, Artificial Sequence
  derived and/or modified sequence opt1 from NALP6__Homo_sapiens__CCDS7693.1
auggaccagcccgaggcccccugcagcuccaccggcccccgccuggccguggcgcgggagcuccugcuggccgcccucgaggagcugagccaggagcagcugaagcgcuuccggcacaagcuccgcgacgucgggcccgacggccgguccauccccugggggcgccuggagcgggccgacgccguggaccuggcggagcagcucgcccaguucuacggcccggagcccgcccuggagguggcccgcaagacccugaagcgggcggacgcccgcgacgucgccgcccagcuccaggagcggcgccugcagcggcuggggcucggcagcggcacgcugcuguccgugagcgaguacaagaagaaguaccgcgagcacgugcuccagcugcacgcccgggucaaggagcgcaacgcgcgguccgugaagaucaccaagcgcuucaccaagcugcucaucgcccccgagagcgccgcccccgaggaggccauggggccggcggaggagcccgagcccggccgggcccgccgguccgacacccacacguucaaccgccuguuccgccgggacgaggaggggcgccggccccugaccgugguccuccagggcccggccgggaucggcaagaccauggccgccaagaagauccuguacgacugggcggccggcaagcuguaccagggccagguggacuucgccuucuucaugcccugcggggagcuccuggagcgccccgggacccggagccuggccgaccucauccuggaccagugccccgaccgcggcgccccggugccccagaugcuggcgcagccccagcggcuccuguucauccuggacggcgccgacgagcuccccgcccucgggggcccggaggccgcgcccugcacggaccccuucgaggccgccuccggggcccgcguccugggcgggcuccugagcaaggcccugcuccccaccgcgcugcugcucgugaccacccgggccgccgccccgggccgccugcagggccggcugugcagcccccagugcgccgaggugcgcggguucuccgacaaggacaagaagaaguacuucuacaaguacuuccgggacgagcgccgggcggagcgcgccuaccgguucgucaaggagaacgagacgcuguucgcccugugcuucgugcccuucgugugcuggaucgucugcaccgugcugcgccagcagcuggagcucggccgggaccugucccgcaccagcaagaccacgaccuccguguaccuccuguucaucaccagcguccuguccagcgcccccguggccgacgggccgcgccugcagggcgaccuccggaaccugugccgccuggcgcgggagggggugcucggccgccgggcccaguucgccgagaaggagcuggagcagcuggagcuccgcggcagcaagguccagacccuguuccuguccaagaaggagcuccccggggugcuggagacggaggucaccuaccaguucaucgaccagagcuuccaggaguuccuggccgcgcucuccuaccugcuggaggacggcggggugccccggaccgccgccggcggggugggcacccuccugcgcggcgacgcccagccgcacagccaccugguccucacgacccgguuccuguucgggcugcucuccgccgagcgcaugcgggacaucgagcgccacuucggcugcauggugagcgagcgggugaagcaggaggcgcugcgcuggguccaggggcagggccagggcugccccgggguggcccccgaggugaccgagggcgccaaggggcuggaggacaccgaggagcccgaggaggaggaggagggcgaggagccgaacuacccccucgagcugcuguacugccucuacgagacgcaggaggacgccuucguccggcaggcccugugccgcuuccccgagcuggcgcuccagcgggugcgcuucugccggauggacguggccguccuguccuacugcgugcgcugcugccccgccgggcaggcccugcggcucaucagcugccgccugguggccgcgcaggagaagaagaagaagucccugggcaagcgccuccaggccagccugggcgggggcuccagcucccaggggaccaccaagcagcugccggccagccuccugcacccccuguuccaggccaugaccgacccccucugccaccuguccagccugacgcucucccacugcaagcugcccgacgcggucugccgggaccugagcgaggcccuccgcgccgccccggcccugaccgagcugggccuccugcacaaccggcuguccgaggcggggcuccgcaugcugagcgagggccuggccuggccccagugccgggugcagaccgugcgcguccagcuccccgacccccagcggggccugcaguaccugguggggaugcuccgccagagcccggcccugaccacgcuggaccucuccggcugccagcugcccgcccccauggugaccuaccugugcgccguccuccagcaccaggggugcggccugcagacccugagccucgcguccguggagcugagcgagcagucccugcaggagcuccaggccgugaagcgggccaagcccgaccuggucaucacccacccggcccuggacgggcacccccagccgcccaaggagcucaucagcaccuucuga

SEQ ID NO: 9091 - RNA, 2679 nt, Artificial Sequence
  derived and/or modified sequence opt2 from NALP6__Homo_sapiens__CCDS7693.1
auggaccagcccgaggcccccugcuccuccaccggcccccgccucgccgucgcccgcgagcuccuccucgccgcccucgaggagcucucccaggagcagcucaagcgcuuccgccacaagcuccgcgacgucggccccgacggccgcuccauccccuggggccgccucgagcgcgccgacgccgucgaccucgccgagcagcucgcccaguucuacggccccgagcccgcccucgaggucgcccgcaagacccucaagcgcgccgacgcccgcgacgucgccgcccagcuccaggagcgccgccuccagcgccucggccucggcuccggcacccuccucuccgucuccgaguacaagaagaaguaccgcgagcacguccuccagcuccacgcccgcgucaaggagcgcaacgcccgcuccgucaagaucaccaagcgcuucaccaagcuccucaucgcccccgaguccgccgcccccgaggaggccaugggccccgccgaggagcccgagcccggccgcgcccgccgcuccgacacccacaccuucaaccgccucuuccgccgcgacgaggagggccgccgcccccucaccgucguccuccagggccccgccggcaucggcaagaccauggccgccaagaagauccucuacgacugggccgccggcaagcucuaccagggccaggucgacuucgccuucuucaugcccugcggcgagcuccucgagcgccccggcacccgcucccucgccgaccucauccucgaccagugccccgaccgcggcgcccccgucccccagaugcucgcccagccccagcgccuccucuucauccucgacggcgccgacgagcuccccgcccucggcggccccgaggccgcccccugcaccgaccccuucgaggccgccuccggcgcccgcguccucggcggccuccucuccaaggcccuccuccccaccgcccuccuccucgucaccacccgcgccgccgcccccggccgccuccagggccgccucugcuccccccagugcgccgagguccgcggcuucuccgacaaggacaagaagaaguacuucuacaaguacuuccgcgacgagcgccgcgccgagcgcgccuaccgcuucgucaaggagaacgagacccucuucgcccucugcuucguccccuucgucugcuggaucgucugcaccguccuccgccagcagcucgagcucggccgcgaccucucccgcaccuccaagaccaccaccuccgucuaccuccucuucaucaccuccguccucuccuccgcccccgucgccgacggcccccgccuccagggcgaccuccgcaaccucugccgccucgcccgcgagggcguccucggccgccgcgcccaguucgccgagaaggagcucgagcagcucgagcuccgcggcuccaagguccagacccucuuccucuccaagaaggagcuccccggcguccucgagaccgaggucaccuaccaguucaucgaccaguccuuccaggaguuccucgccgcccucuccuaccuccucgaggacggcggcgucccccgcaccgccgccggcggcgucggcacccuccuccgcggcgacgcccagccccacucccaccucguccucaccacccgcuuccucuucggccuccucuccgccgagcgcaugcgcgacaucgagcgccacuucggcugcauggucuccgagcgcgucaagcaggaggcccuccgcuggguccagggccagggccagggcugccccggcgucgcccccgaggucaccgagggcgccaagggccucgaggacaccgaggagcccgaggaggaggaggagggcgaggagcccaacuacccccucgagcuccucuacugccucuacgagacccaggaggacgccuucguccgccaggcccucugccgcuuccccgagcucgcccuccagcgcguccgcuucugccgcauggacgucgccguccucuccuacugcguccgcugcugccccgccggccaggcccuccgccucaucuccugccgccucgucgccgcccaggagaagaagaagaagucccucggcaagcgccuccaggccucccucggcggcggcuccuccucccagggcaccaccaagcagcuccccgccucccuccuccacccccucuuccaggccaugaccgacccccucugccaccucuccucccucacccucucccacugcaagcuccccgacgccgucugccgcgaccucuccgaggcccuccgcgccgcccccgcccucaccgagcucggccuccuccacaaccgccucuccgaggccggccuccgcaugcucuccgagggccucgccuggccccagugccgcguccagaccguccgcguccagcuccccgacccccagcgcggccuccaguaccucgucggcaugcuccgccagucccccgcccucaccacccucgaccucuccggcugccagcuccccgcccccauggucaccuaccucugcgccguccuccagcaccagggcugcggccuccagacccucucccucgccuccgucgagcucuccgagcagucccuccaggagcuccaggccgucaagcgcgccaagcccgaccucgucaucacccaccccgcccucgacggccacccccagccccccaaggagcucaucuccaccuucuga

SEQ ID NO: 9092 - RNA, 2679 nt, Artificial Sequence
  derived and/or modified sequence opt3 from NALP6__Homo_sapiens__CCDS7693.1
auggaccagcccgaggccccuugcagcuccaccggcccaagacuggcuguggcaagggaacuccuucuggccgcguuggaggaauuaucucaagagcagcugaagcgguuccgccacaaacuacgagaugucgggccggacggacguucaauccccugggguagacucgaaagggcugaugccguugaccuggcagagcagcuugcccaguuuuacggcccugagccagcucuggaaguggcacggaagacauugaaacgcgccgaugcuagagacguagccgcgcaacuccaggagaggcggcugcagcgccuggggcucggaaguggcacuuuacugagcguguccgaauauaagaaaaaguaccgagagcauguccuucaguugcacgcaagagugaaggagaggaacgcccggucuguuaaaauuacgaagcguuucaccaaacugcuaauagcucccgaaucggccgcaccugaggaagcuauggguccagccgaggaacccgagccugggcgcgcgagaaggucagauacacauacuuuuaaucgguuguuccgacgcgacgaggaaggaagaaggccacugaccgugguccuucaaggcccggccggcaucgggaagacaauggcagcuaaaaagauucuguaugauugggccgcuggaaaguuguaccagggucagguggacuuugccuucuuuaugcccuguggcgagcuccuggaacggccugggacccgcagcuuagcagaucugauccucgaccagugcccagauagaggagcccccguaccucaaaugcuugcucagccacagaggcuguuguucauucuagacggcgcggacgagcugcccgcacucggugggccggaagccgcuccuuguacugaucccuuugaggccgcaaguggagcccguguucugggcggccuucuguccaaagcucuccucccaacagcccuguuacuggugaccacgcgggcagcggcuccugggcgacuacaaggaagacucugcucuccccagugugccgaggucagggguuucagcgacaaggauaaaaagaaauauuuuuacaaguauuuccgcgacgaacggagagcagagagggccuaccgcuuugugaaagaaaacgagacucuguucgcucuuugcuucgugccauuugucuguuggaucguuugcaccguguugcgacagcagcuggaacucggccgggaucugucccguacaucaaagacuaccacaaguguauaccuucuguucauaaccagcguguugucuuccgcccccgucgcagacgggccuagacuccaaggagaucugaggaauuuaugucgccuggcucgggagggcgugcuagguagaagggcccaguuugcggagaaggaacucgagcagcuggaacuucgagggucaaaaguucagacguuguuccugagcaagaaagagcucccaggcgugcuggagacugaagucacauaucaauuuaucgaccagaguuuccaggaguuuuuagccgcucugucuuaccuuuuggaagauggaggcgugccgcgcaccgcagccgggggaguagguacucuccugcggggcgacgcucagccccacucccaucuaguucugacaaccagauuccucuuugggcugcuuagcgccgagaggaugcgugauauugaacgccacuucggaugcauggugucggagcgggucaagcaagaggcauugagaugggugcagggccagggucagggguguccuggcgucgcgccagaagugacggagggagccaaaggccuggaagacaccgaggaacccgaggaggaagaggaaggggaggaaccuaacuauccauuagagcuccuguacugccuuuaugagacacaagaagacgcuuuuguuaggcaggcccugugccgauuccccgaguuggcacuccagcgggugcgcuuuuguagaauggauguagcuguccugucuuacugcgugagguguugcccggccggacaagcacuacggcugaucuccugucgacucguugccgcucaggaaaagaagaaaaagucacuggguaaaagacuucaggcgaguuugggcgggggaagcuccucucagggcacuaccaagcaacugccugccagcuuacuccacccacuguuccaggcaaugacagacccccuuugccaucugucaagucuaacucucucccacuguaaacugccugaugcugugugccgcgacuugagcgaggcccugagggccgcucccgcauuaaccgagcucggucugcuucauaaucgucugucugaagccggguugcggaugcucucagagggccuggcguggccacaguguagaguccagacagugaggguacaacuaccugauccccagcgcggacugcaguaucuugugggcaugcuccgacagaguccagcucugaccacuuuggaccugagcgggugccaauuaccggccccuaugguuacguaccucugugcaguccugcagcaccagggaugcggccuucaaacacuguccuuggccucuguggaacucucggagcagagccugcaggaacuacaggcugugaagagagcaaagcccgaucuggucauuacccacccagcccuugacggucauccccaaccuccaaaagagcucaucuccacuuucuga

SEQ ID NO: 9093 - RNA, 2679 nt, Artificial Sequence
  derived and/or modified sequence opt4 from NALP6__Homo_sapiens__CCDS7693.1
auggaccagcccgaggcccccugcagcagcaccggccccagacuggccguggccagagagcugcugcuggccgcccuggaggagcugagccaggagcagcugaagagauucagacacaagcugagagacgugggccccgacggcagaagcauccccuggggcagacuggagagagccgacgccguggaccuggccgagcagcuggcccaguucuacggccccgagcccgcccuggagguggccagaaagacccugaagagagccgacgccagagacguggccgcccagcugcaggagagaagacugcagagacugggccugggcagcggcacccugcugagcgugagcgaguacaagaagaaguacagagagcacgugcugcagcugcacgccagagugaaggagagaaacgccagaagcgugaagaucaccaagagauucaccaagcugcugaucgcccccgagagcgccgcccccgaggaggccaugggccccgccgaggagcccgagcccggcagagccagaagaagcgacacccacaccuucaacagacuguucagaagagacgaggagggcagaagaccccugaccguggugcugcagggccccgccggcaucggcaagaccauggccgccaagaagauccuguacgacugggccgccggcaagcuguaccagggccagguggacuucgccuucuucaugcccugcggcgagcugcuggagagacccggcaccagaagccuggccgaccugauccuggaccagugccccgacagaggcgcccccgugccccagaugcuggcccagccccagagacugcuguucauccuggacggcgccgacgagcugcccgcccugggcggccccgaggccgcccccugcaccgaccccuucgaggccgccagcggcgccagagugcugggcggccugcugagcaaggcccugcugcccaccgcccugcugcuggugaccaccagagccgccgcccccggcagacugcagggcagacugugcagcccccagugcgccgaggugagaggcuucagcgacaaggacaagaagaaguacuucuacaaguacuucagagacgagagaagagccgagagagccuacagauucgugaaggagaacgagacccuguucgcccugugcuucgugcccuucgugugcuggaucgugugcaccgugcugagacagcagcuggagcugggcagagaccugagcagaaccagcaagaccaccaccagcguguaccugcuguucaucaccagcgugcugagcagcgcccccguggccgacggccccagacugcagggcgaccugagaaaccugugcagacuggccagagagggcgugcugggcagaagagcccaguucgccgagaaggagcuggagcagcuggagcugagaggcagcaaggugcagacccuguuccugagcaagaaggagcugcccggcgugcuggagaccgaggugaccuaccaguucaucgaccagagcuuccaggaguuccuggccgcccugagcuaccugcuggaggacggcggcgugcccagaaccgccgccggcggcgugggcacccugcugagaggcgacgcccagccccacagccaccuggugcugaccaccagauuccuguucggccugcugagcgccgagagaaugagagacaucgagagacacuucggcugcauggugagcgagagagugaagcaggaggcccugagaugggugcagggccagggccagggcugccccggcguggcccccgaggugaccgagggcgccaagggccuggaggacaccgaggagcccgaggaggaggaggagggcgaggagcccaacuacccccuggagcugcuguacugccuguacgagacccaggaggacgccuucgugagacaggcccugugcagauuccccgagcuggcccugcagagagugagauucugcagaauggacguggccgugcugagcuacugcgugagaugcugccccgccggccaggcccugagacugaucagcugcagacugguggccgcccaggagaagaagaagaagagccugggcaagagacugcaggccagccugggcggcggcagcagcagccagggcaccaccaagcagcugcccgccagccugcugcacccccuguuccaggccaugaccgacccccugugccaccugagcagccugacccugagccacugcaagcugcccgacgccgugugcagagaccugagcgaggcccugagagccgcccccgcccugaccgagcugggccugcugcacaacagacugagcgaggccggccugagaaugcugagcgagggccuggccuggccccagugcagagugcagaccgugagagugcagcugcccgacccccagagaggccugcaguaccuggugggcaugcugagacagagccccgcccugaccacccuggaccugagcggcugccagcugcccgcccccauggugaccuaccugugcgccgugcugcagcaccagggcugcggccugcagacccugagccuggccagcguggagcugagcgagcagagccugcaggagcugcaggccgugaagagagccaagcccgaccuggugaucacccaccccgcccuggacggccacccccagccccccaaggagcugaucagcaccuucuga

SEQ ID NO: 9094 - RNA, 2679 nt, Artificial Sequence
  derived and/or modified sequence opt5 from NALP6__Homo_sapiens__CCDS7693.1
auggaccagcccgaggccccuugcagcuccaccggcccgagacuggcuguggcccgggaacuccugcuugcggcucuggaggaacucucucaagagcagcugaagcgcuucagacacaaacuucgggaugucgggcccgacggacgcagcaucccuuggggcagacuggaacgggccgaugccguugaccucgcugagcagcuggcccaguuuuacgggcccgagccugcucuggaaguggcccgcaagacacucaaaagagcggaugcccgggacguggcugcccaacugcaggagcgcagacuucagcggcugggacucggcuccgggacgcugcuuucugucagcgaauauaagaaaaaguaccgcgagcaugugcugcagcuccacgcuagaguuaaggagcggaacgcccgcuccgugaaaauuaccaagagauucacaaaacugcugaucgcgcccgaaucugccgcuccugaggaagccaugggaccggcugaggaacccgagccuggccgggccagacgcagcgauacccauacauuuaaucggcuguucagacgcgacgaggaaggccggagaccccugaccgucgugcuucaagggccugccggaauuggcaagacaauggcugcgaaaaagauccuguaugauugggccgcugggaagcucuaccagggacagguugacuuugccuucuuuaugcccuguggcgagcugcuugaacgcccggggacccggucccuggccgaucucauucuggaccagugcccugauagaggagcucccgugccucaaaugcuggcccagccccagcgccuccuguucauccuugacggcgcggacgagcugcccgcucucggcgggccugaagccgccccguguacggaucccuuugaggcugccagcggagcucggguccugggcgggcuucugucuaaagcccuccugccuaccgcgcugcuccuggugacaaccagagccgcugcccccggacgccuucaaggccggcugugcuccccucagugugcugaggugagaggguucagcgacaaggauaaaaagaaauauuuuuacaaguauuuccgggacgaacgcagagccgagcgggcguacagauuugucaaagaaaacgagacacucuucgcccugugcuucguucccuuuguguguuggaucgugugcaccguccugcgccagcagcuugaacucggacgggaucugucuagaacguccaagacaaccacaagcguguaccuccucuucauuaccucuguucuguccagcgcuccgguggccgacggcccucgccuucaaggcgaucugagaaaucucugucggcuggcucgcgaggggguccugggaagacgggcccaguuugccgagaaggaacuugagcagcucgaacugcgcggcuccaaagugcagacccuguuccucucuaagaaagagcugcccgggguucuugagacagaagugacguaucaauuuaucgaccagagcuuccaggaguuucuggcugcgcucuccuaccugcuggaagauggaggcgucccuagaaccgccgcugggggcgugggaacacuucuccggggcgacgcccagccccacagccaucugguccugaccacacgcuuccucuuugggcugcuuucugccgagagaaugcgggauauugaacgccacuucggaugcaugguguccgagagaguuaagcaagaggcucugcggugggugcagggccaggggcagggauguccuggcgucgcccccgaagugaccgagggggcgaaaggccucgaagacacggaggaaccggaggaggaagaggaaggagaggaaccuaacuauccccuggagcugcuuuacugccucuaugagacacaagaagacgcuuuuguuagacaggcccugugccgcuuccccgagcuggcccuccagcgggugagauuuugucgcauggaugucgcugugcugagcuacugcgugcgguguugcccugccggccaagcgcuuagacugaucucuugucgccucguugcugcccaggaaaagaagaaaaagagccuggggaaacggcugcaggccucccuuggaggcgggucuagcucccagggaaccaccaagcaacugccggcuagccuccugcacccccucuuccaggccaugacagacccucugugccaucuuucuucccugacccucagccacuguaaacugcccgaugcugucugcagagaccugucugaggcccuucgcgcggccccugcucugacagagcucggccugcuccauaaucggcuguccgaagccgggcuuagaaugcugagcgagggccucgcuuggccccagugucgggugcagacggugcgcguccaacugccugauccccagagaggacugcaguaucuugugggcaugcugcggcaguccccggcccucaccacacuggaccucucugggugccaacugccugcccccaugguuaccuaccuuugugcugugcugcagcaccagggaugcggccugcaaacacucagccuggcguccgucgaacuuucugagcagagccugcaggaacuccaggccgugaagcgcgcuaagccugaucugguuauuacccaccccgcccucgacgggcauccgcaaccucccaaagagcugaucuccacguucuga

SEQ ID NO: 9095 - protein, 980 aa, Artificial Sequence
  NALP7__Homo_sapiens__Q8WX94
MTSPQLEWTLQTLLEQLNEDELKSFKSLLWAFPLEDVLQKTPWSEVEEADGKKLAEILVNTSSENWIRNATVNILEEMNLTELCKMAKAEMMEDGQVQEIDNPELGDAEEDSELAKPGEKEGWRNSMEKQSLVWKNTFWQGDIDNFHDDVTLRNQRFIPFLNPRTPRKLTPYTVVLHGPAGVGKTTLAKKCMLDWTDCNLSPTLRYAFYLSCKELSRMGPCSFAELISKDWPELQDDIPSILAQAQRILFVVDGLDELKVPPGALIQDICGDWEKKKPVPVLLGSLLKRKMLPRAALLVTTRPRALRDLQLLAQQPIYVRVEGFLEEDRRAYFLRHFGDEDQAMRAFELMRSNAALFQLGSAPAVCWIVCTTLKLQMEKGEDPVPTCLTRTGLFLRFLCSRFPQGAQLRGALRTLSLLAAQGLWAQMSVFHREDLERLGVQESDLRLFLDGDILRQDRVSKGCYSFIHLSFQQFLTALFYALEKEEGEDRDGHAWDIGDVQKLLSGEERLKNPDLIQVGHFLFGLANEKRAKELEATFGCRMSPDIKQELLQCKAHLHANKPLSVTDLKEVLGCLYESQEEELAKVVVAPFKEISIHLTNTSEVMHCSFSLKHCQDLQKLSLQVAKGVFLENYMDFELDIEFERCTYLTIPNWARQDLRSLRLWTDFCSLFSSNSNLKFLEVKQSFLSDSSVRILCDHVTRSTCHLQKVEIKNVTPDTAYRDFCLAFIGKKTLTHLTLAGHIEWERTMMLMLCDLLRNHKCNLQYLRLGGHCATPEQWAEFFYVLKANQSLKHLRLSANVLLDEGAMLLYKTMTRPKHFLQMLSLENCRLTEASCKDLAAVLVVSKKLTHLCLAKNPIGDTGVKFLCEGLSYPDCKLQTLVLQQCSITKLGCRYLSEALQEACSLTNLDLSINQIARGLWILCQALENPNCNLKHLRLKTYETNLEIKKLLEEVKEKNPKLTIDCNASGATAPPCCDFFC

SEQ ID NO: 9096 - RNA, 2943 nt, Artificial Sequence
  NALP7__Homo_sapiens__AAL69963
augacaucgccccagcuagaguggacucugcagacccuucuggagcagcugaacgaggaugaauuaaagaguuucaaaucccuuuuaugggcuuuuccccucgaagacgugcuacagaagaccccauggucugagguggaagaggcugauggcaagaaacuggcagaaauucuggucaacaccuccucagaaaauuggauaaggaaugcgacugugaacaucuuggaagagaugaaucucacggaauuguguaagauggcaaaggcugagaugauggaggacggacaggugcaagaaauagauaauccugagcugggagaugcagaagaagacucggaguuagcaaagccaggugaaaaggaaggauggagaaauucaauggagaaacagucuuuggucuggaagaacaccuuuuggcaaggagacauugacaauuuccaugacgacgucacucugagaaaccaacgguucauuccauucuugaaucccagaacacccaggaagcuaacaccuuacacgguggugcugcacggccccgcaggcguggggaaaaccacgcuggccaaaaaguguaugcuggacuggacagacugcaaccucagcccgacgcucagauacgcguucuaccucagcugcaaggagcucagccgcaugggccccugcaguuuugcagagcugaucuccaaagacuggccugaauugcaggaugacauuccaagcauccuagcccaagcacagagaauccuguucguggucgauggccuugaugagcugaaagucccaccuggggcgcugauccaggacaucugcggggacugggagaagaagaagccggugcccguccuccuggggaguuugcugaagaggaagauguuacccagggcagccuugcuggucaccacgcggcccagggcacugagggaccuccagcuccuggcgcagcagccgaucuacguaaggguggagggcuuccuggaggaggacaggagggccuauuuccugagacacuuuggagacgaggaccaagccaugcgugccuuugagcuaaugaggagcaacgcggcccuguuccagcugggcucggcccccgcggugugcuggauugugugcacgacucugaagcugcagauggagaagggggaggacccgguccccaccugccucacccgcacggggcuguuccugcguuuccucugcagccgguucccgcagggcgcacagcugcggggcgcgcugcggacgcugagccuccuggccgcgcagggccugugggcgcagauguccguguuccaccgagaggaccuggaaaggcucggggugcaggaguccgaccuccgucuguuccuggacggagacauccuccgccaggacagagucuccaaaggcugcuacuccuucauccaccucagcuuccagcaguuucucacugcccuguucuacgcccuggagaaggaggagggggaggacagggacggccacgccugggacaucggggacguacagaagcugcuuuccggagaagaaagacucaagaaccccgaccugauucaaguaggacacuucuuauucggccucgcuaacgagaagagagccaaggaguuggaggccacuuuuggcugccggaugucaccggacaucaaacaggaauugcugcaaugcaaagcacaucuucaugcaaauaagcccuuauccgugaccgaccugaaggaggucuugggcugccuguaugagucucaggaggaggagcuggcgaagguggugguggccccguucaaggaaauuucuauucaccugacaaauacuucugaagugaugcauuguuccuucagccugaagcauugucaagacuugcagaaacucucacugcagguagcaaaggggguguuccuggagaauuacauggauuuugaacuggacauugaauuugaaaggugcacuuaccuaaccauuccgaacugggcucggcaggaucuucgcucucuucgccucuggacagauuucugcucucucuucagcucaaacagcaaccucaaguuucuggaagugaaacaaagcuuccugagugacucuucugugcggauucuuugugaccacguaacccguagcaccugucaucugcagaaaguggagauuaaaaacgucaccccugacaccgcguaccgggacuucugucuugcuuucauugggaagaagacccucacgcaccugacccuggcagggcacaucgagugggaacgcacgaugaugcugaugcugugugaccugcucagaaaucauaaaugcaaccugcaguaccugagguugggaggucacugugccaccccggagcagugggcugaauucuucuauguccucaaagccaaccagucccugaagcaccugcgucucucagccaaugugcuccuggaugagggugccauguugcuguacaagaccaugacacgcccaaaacacuuccugcagauguugucguuggaaaacugucgucuuacagaagccaguugcaaggaccuugcugcugucuugguugucagcaagaagcugacacaccugugcuuggccaagaaccccauuggggauacaggggugaaguuucugugugagggcuugaguuacccugauuguaaacugcagaccuugguguuacagcaaugcagcauaaccaagcuuggcuguagauaucucucagaggcgcuccaagaagccugcagccucacaaaccuggacuugaguaucaaccagauagcucguggauuguggauucucugucaggcauuagagaauccaaacuguaaccuaaaacaccuacgguugaagaccuaugaaacuaauuuggaaaucaagaagcuguuggaggaagugaaagaaaagaaucccaagcugacuauugauugcaaugcuuccggggcaacggcaccuccgugcugugacuuuuuuugcuga

SEQ ID NO: 9097 - RNA, 2943 nt, Artificial Sequence
  derived and/or modified sequence opt1 from NALP7__Homo_sapiens__AAL69963
augaccagcccccagcuggaguggacccuccagacgcugcuggagcagcucaacgaggacgagcugaaguccuucaagagccugcucugggccuucccccuggaggacgugcugcagaagacccccugguccgaggucgaggaggccgacggcaagaagcucgcggagauccuggugaacaccagcuccgagaacuggauccgcaacgccaccgugaacauccuggaggagaugaaccucacggagcugugcaagauggccaaggccgagaugauggaggacgggcagguccaggagaucgacaaccccgagcugggcgacgccgaggaggacagcgagcucgcgaagcccggggagaaggagggcuggcggaacuccauggagaagcagagccugguguggaagaacaccuucuggcagggggacaucgacaacuuccacgacgacgugacccugcgcaaccagcgguucaucccguuccucaacccccgcacgccccggaagcugacccccuacaccgucgugcugcacggcccggccggcguggggaagaccacccucgccaagaagugcaugcuggacuggacggacugcaaccugucccccacccuccgcuacgccuucuaccugagcugcaaggagcugucccggaugggccccugcagcuucgcggagcucaucuccaaggacuggcccgagcugcaggacgacaucccgagcauccuggcccaggcccagcgcauccucuucgucguggacgggcuggacgagcugaaggugccgcccggcgcccucauccaggacaucugcggggacugggagaagaagaagcccguccccgugcugcugggcucccuccugaagcggaagaugcugccccgcgccgcgcuccuggugaccacccggccccgcgcccugcgggaccuccagcugcuggcccagcagcccaucuacguccgcguggagggcuuccucgaggaggaccggcgcgccuacuuccugcggcacuucggggacgaggaccaggccaugcgcgcguucgagcugaugcggagcaacgccgcccucuuccagcugggcuccgccccggccgugugcuggaucgucugcacgacccugaagcugcagauggagaagggggaggaccccgugccgaccugccucacccgcacgggccuguuccugcgguuccucugcagccgcuucccccagggcgcgcagcugcgcggggcccugcggacccucucccugcuggccgcccagggccucugggcccagaugagcguguuccaccgcgaggaccuggagcggcuggggguccaggagagcgaccuccgccuguuccuggacggcgacauccuccggcaggaccgcguguccaaggggugcuacagcuucauccaccuguccuuccagcaguuccugaccgcgcuguucuacgcccuggagaaggaggagggcgaggaccgggacggccacgccugggacaucggggacgugcagaagcugcucagcggcgaggagcgccugaagaaccccgaccugauccaggucgggcacuuccucuucggccuggccaacgagaagcgggcgaaggagcuggaggccaccuucgggugccgcaugucccccgacaucaagcaggagcuccugcagugcaaggcccaccuccacgccaacaagccccucagcgugacggaccugaaggagguccugggcugccucuacgagucccaggaggaggagcuggccaaggugguggucgcgcccuucaaggagaucagcauccaccugaccaacaccuccgaggugaugcacugcagcuucucccucaagcacugccaggaccugcagaagcugagccuccagguggccaagggcgucuuccuggagaacuacauggacuucgagcuggacaucgaguucgagcggugcaccuaccucacgaucccgaacugggcccgccaggaccugcggucccugcgccucuggaccgacuucugcagccuguucuccagcaacuccaaccugaaguuccucgaggugaagcagagcuuccuguccgacagcagcgugcggauccugugcgaccacgucacccgcuccacgugccaccuccagaagguggagaucaagaacgugacccccgacaccgccuaccgggacuucugccuggccuucaucgggaagaagacccugacccaccucacgcuggcgggccacaucgagugggagcgcaccaugaugcugaugcucugcgaccugcugcggaaccacaagugcaaccuccaguaccugcgccucgggggccacugcgccacccccgagcagugggccgaguucuucuacguccugaaggccaaccagagccugaagcaccuccgccuguccgccaacgugcugcuggacgagggggcgaugcuccuguacaagaccaugacccggccgaagcacuuccugcagaugcucagccuggagaacugccgccugacggaggccuccugcaaggaccucgccgccgugcuggucgugagcaagaagcugacccaccucugccuggcgaagaaccccaucggcgacaccggcgugaaguuccugugcgaggggcucuccuaccccgacugcaagcugcagacccugguccuccagcagugcagcaucacgaagcugggcugccgguaccuguccgaggcccuccaggaggccugcagccugaccaaccuggaccucuccaucaaccagaucgcccgcgggcuguggauccugugccaggcccucgagaaccccaacugcaaccugaagcaccuccggcugaagaccuacgagaccaaccuggagaucaagaagcugcuggaggaggugaaggagaagaacccgaagcucacgaucgacugcaacgcgagcggcgccaccgccccgcccugcugcgacuucuucugcuga

SEQ ID NO: 9098 - RNA, 2943 nt, Artificial Sequence
  derived and/or modified sequence opt2 from NALP7__Homo_sapiens__AAL69963
augaccuccccccagcucgaguggacccuccagacccuccucgagcagcucaacgaggacgagcucaaguccuucaagucccuccucugggccuucccccucgaggacguccuccagaagacccccugguccgaggucgaggaggccgacggcaagaagcucgccgagauccucgucaacaccuccuccgagaacuggauccgcaacgccaccgucaacauccucgaggagaugaaccucaccgagcucugcaagauggccaaggccgagaugauggaggacggccagguccaggagaucgacaaccccgagcucggcgacgccgaggaggacuccgagcucgccaagcccggcgagaaggagggcuggcgcaacuccauggagaagcagucccucgucuggaagaacaccuucuggcagggcgacaucgacaacuuccacgacgacgucacccuccgcaaccagcgcuucauccccuuccucaacccccgcaccccccgcaagcucacccccuacaccgucguccuccacggccccgccggcgucggcaagaccacccucgccaagaagugcaugcucgacuggaccgacugcaaccucucccccacccuccgcuacgccuucuaccucuccugcaaggagcucucccgcaugggccccugcuccuucgccgagcucaucuccaaggacuggcccgagcuccaggacgacauccccuccauccucgcccaggcccagcgcauccucuucgucgucgacggccucgacgagcucaaggucccccccggcgcccucauccaggacaucugcggcgacugggagaagaagaagcccguccccguccuccucggcucccuccucaagcgcaagaugcucccccgcgccgcccuccucgucaccacccgcccccgcgcccuccgcgaccuccagcuccucgcccagcagcccaucuacguccgcgucgagggcuuccucgaggaggaccgccgcgccuacuuccuccgccacuucggcgacgaggaccaggccaugcgcgccuucgagcucaugcgcuccaacgccgcccucuuccagcucggcuccgcccccgccgucugcuggaucgucugcaccacccucaagcuccagauggagaagggcgaggaccccguccccaccugccucacccgcaccggccucuuccuccgcuuccucugcucccgcuucccccagggcgcccagcuccgcggcgcccuccgcacccucucccuccucgccgcccagggccucugggcccagauguccgucuuccaccgcgaggaccucgagcgccucggcguccaggaguccgaccuccgccucuuccucgacggcgacauccuccgccaggaccgcgucuccaagggcugcuacuccuucauccaccucuccuuccagcaguuccucaccgcccucuucuacgcccucgagaaggaggagggcgaggaccgcgacggccacgccugggacaucggcgacguccagaagcuccucuccggcgaggagcgccucaagaaccccgaccucauccaggucggccacuuccucuucggccucgccaacgagaagcgcgccaaggagcucgaggccaccuucggcugccgcaugucccccgacaucaagcaggagcuccuccagugcaaggcccaccuccacgccaacaagccccucuccgucaccgaccucaaggagguccucggcugccucuacgagucccaggaggaggagcucgccaaggucgucgucgcccccuucaaggagaucuccauccaccucaccaacaccuccgaggucaugcacugcuccuucucccucaagcacugccaggaccuccagaagcucucccuccaggucgccaagggcgucuuccucgagaacuacauggacuucgagcucgacaucgaguucgagcgcugcaccuaccucaccauccccaacugggcccgccaggaccuccgcucccuccgccucuggaccgacuucugcucccucuucuccuccaacuccaaccucaaguuccucgaggucaagcaguccuuccucuccgacuccuccguccgcauccucugcgaccacgucacccgcuccaccugccaccuccagaaggucgagaucaagaacgucacccccgacaccgccuaccgcgacuucugccucgccuucaucggcaagaagacccucacccaccucacccucgccggccacaucgagugggagcgcaccaugaugcucaugcucugcgaccuccuccgcaaccacaagugcaaccuccaguaccuccgccucggcggccacugcgccacccccgagcagugggccgaguucuucuacguccucaaggccaaccagucccucaagcaccuccgccucuccgccaacguccuccucgacgagggcgccaugcuccucuacaagaccaugacccgccccaagcacuuccuccagaugcucucccucgagaacugccgccucaccgaggccuccugcaaggaccucgccgccguccucgucgucuccaagaagcucacccaccucugccucgccaagaaccccaucggcgacaccggcgucaaguuccucugcgagggccucuccuaccccgacugcaagcuccagacccucguccuccagcagugcuccaucaccaagcucggcugccgcuaccucuccgaggcccuccaggaggccugcucccucaccaaccucgaccucuccaucaaccagaucgcccgcggccucuggauccucugccaggcccucgagaaccccaacugcaaccucaagcaccuccgccucaagaccuacgagaccaaccucgagaucaagaagcuccucgaggaggucaaggagaagaaccccaagcucaccaucgacugcaacgccuccggcgccaccgccccccccugcugcgacuucuucugcuga

SEQ ID NO: 9099 - RNA, 2943 nt, Artificial Sequence
  derived and/or modified sequence opt3 from NALP7__Homo_sapiens__AAL69963
augaccagcccccagcuggaauggacacuccaaacucuucuggaacaguugaacgaggacgaauuaaaguccuucaaaucucugcuaugggccuuuccucucgaggaugugcugcagaagacgccauggucagaagucgaggaggcugacggcaaaaagcuggcagaaauccuuguuaauaccaguagcgagaacuggauuagaaaugccacagugaacauauuggaagagaugaaucucacugagcugugcaaaauggcgaaggcugaaaugauggaggaugggcagguacaagaaaucgacaacccggagcugggagaugccgaagaggacuccgagcucgcaaagcccggugaaaaagagggcuggagaaauucuauggaaaagcagucguuaguguggaaaaacaccuucuggcagggggauauugacaauuuucacgaugacgucacacugcggaaccagcgcuucaucccuuuucuuaauccacgaacuccccguaaguugaccccuuacacagugguucugcauggaccagccggcguggguaaaaccacgcuagcuaagaaguguaugcucgauuggacugacugcaaccugucacccacccuuagauaugcauucuaccugagcuguaaagaguugaguaggauggggccuugcuccuuugccgaacucauuucuaaggauuggccagagcugcaagacgacaucccgagcauauuagcucaggcccagcggauccuguucgucguggauggacucgacgagcuuaaaguacccccuggcgcgcugauucaggauaucuguggcgacugggaaaagaaaaagccaguucccguguugcuagggucccugcucaaacgcaagaugcugccuagagcagcccuucuggucacaacuaggccacgggcuuugcgcgaucuccaacuguuagcccagcagcccauuuaugugcgaguggagggauuucuggaagaggacagaagggcauacuuccuacggcacuuuggugaugaagaccaagcuaugcgugccuucgagcucaugcgcucaaaugcggcccuguuucagcuuggcagugcaccggcugucugcuggaucguuuguaccacauugaagcugcagauggagaaaggggaagauccugugccaaccugccucacgagaacuggacuguuccuuagguuccuguguagccgguuuccccagggcgcccaauugcgaggugcucuccgcacacugucuuuacuggccgcacaggggcuaugggcccagauguccguauuccauagagaggaccucgaaaggcugggagugcaggagucagaucuucgguuguuucuggacggcgacauacuccgccaagauagagucagcaagggcugcuauaguuucauucaccugucuuuucagcaguucuuaaccgcucuguuuuacgcgcuugagaaagaagagggggaagacagggauggacaugcaugggacaucggugaugugcagaaguugcucuccggcgaggaacgucugaaaaacccugaccuaauucaaguugggcacuuccuguuuggacucgccaaugagaagcgggcuaaggagcuggaagccacuuucggcugucgaaugagccccgauaucaaacaggagcuuuugcagugcaaggcacaucugcacgccaacaaaccauuaucggugacagaccucaaggaaguccuggguugccuuuaugagucucaggaagaggagcuggcuaaagugguaguugcccccuuuaaggaaaucuccauucacuugaccaacacgucagaggugaugcauuguaguuucagccucaagcacugccaagaucugcagaaacuaucccugcaggucgcaaaggggguguuucucgaaaauuacauggacuucgagcuggauauagaguucgaaagauguaccuaccuuacaaucccuaacugggcgaggcaagacuugcgcucucugcgguuauggacugauuuuugcagccucuucucaaguaauuccaaccugaaauuucuugaggucaagcagagcuuccugucugacucaagugugaggauucuaugugaccacguuaccaggagcacaugccaucuccagaaaguggaaaucaagaauguaacuccagauaccgcuuaucgcgacuuuugucuggccuucauaggcaagaaaacauugacccaccugacuuuagcaggacauauugagugggaacgaacgaugaugcucaugcugugcgaucuucugcggaaccacaaguguaauuugcaguaccuccgucugggcgggcauugcgccacaccggagcaaugggcugaguuuuucuauguccuaaaagccaaccagucccugaagcaccuuagacucucugcaaaugugcuguuggacgaaggagcuaugcuguuauacaaaaccaugacuaggcccaagcacuuucuccagaugcugucgcuugagaacugucgccugaccgaagccagcugcaaagauuuggcggccguucucguggucuccaagaagcugacacaucuaugccuggcuaaaaauccuaucggugacaccggcgugaaguuccuuugugaggggcucucauauccagauugcaaacugcagacuuugguauuacaacaguguaguaucacaaagcugggaugccgguaccucucugaagcacugcaggaggccuguagccuuacgaaccuggacuuguccauuaaucagaucgcuagaggccuauggauucugugccaagcccucgagaaccccaauuguaaccugaaacaccuuagguuaaagaccuaugaaacuaaccuggagauaaagaaacucuuggaagaggugaaggagaaaaauccuaagcugacaaucgauugcaacgcaucaggugcgaccgccccacccuguugcgacuuuuucuguuga

SEQ ID NO: 9100 - RNA, 2943 nt, Artificial Sequence
  derived and/or modified sequence opt4 from NALP7__Homo_sapiens__AAL69963
augaccagcccccagcuggaguggacccugcagacccugcuggagcagcugaacgaggacgagcugaagagcuucaagagccugcugugggccuucccccuggaggacgugcugcagaagacccccuggagcgagguggaggaggccgacggcaagaagcuggccgagauccuggugaacaccagcagcgagaacuggaucagaaacgccaccgugaacauccuggaggagaugaaccugaccgagcugugcaagauggccaaggccgagaugauggaggacggccaggugcaggagaucgacaaccccgagcugggcgacgccgaggaggacagcgagcuggccaagcccggcgagaaggagggcuggagaaacagcauggagaagcagagccugguguggaagaacaccuucuggcagggcgacaucgacaacuuccacgacgacgugacccugagaaaccagagauucauccccuuccugaaccccagaacccccagaaagcugacccccuacaccguggugcugcacggccccgccggcgugggcaagaccacccuggccaagaagugcaugcuggacuggaccgacugcaaccugagccccacccugagauacgccuucuaccugagcugcaaggagcugagcagaaugggccccugcagcuucgccgagcugaucagcaaggacuggcccgagcugcaggacgacauccccagcauccuggcccaggcccagagaauccuguucgugguggacggccuggacgagcugaaggugccccccggcgcccugauccaggacaucugcggcgacugggagaagaagaagcccgugcccgugcugcugggcagccugcugaagagaaagaugcugcccagagccgcccugcuggugaccaccagacccagagcccugagagaccugcagcugcuggcccagcagcccaucuacgugagaguggagggcuuccuggaggaggacagaagagccuacuuccugagacacuucggcgacgaggaccaggccaugagagccuucgagcugaugagaagcaacgccgcccuguuccagcugggcagcgcccccgccgugugcuggaucgugugcaccacccugaagcugcagauggagaagggcgaggaccccgugcccaccugccugaccagaaccggccuguuccugagauuccugugcagcagauucccccagggcgcccagcugagaggcgcccugagaacccugagccugcuggccgcccagggccugugggcccagaugagcguguuccacagagaggaccuggagagacugggcgugcaggagagcgaccugagacuguuccuggacggcgacauccugagacaggacagagugagcaagggcugcuacagcuucauccaccugagcuuccagcaguuccugaccgcccuguucuacgcccuggagaaggaggagggcgaggacagagacggccacgccugggacaucggcgacgugcagaagcugcugagcggcgaggagagacugaagaaccccgaccugauccaggugggccacuuccuguucggccuggccaacgagaagagagccaaggagcuggaggccaccuucggcugcagaaugagccccgacaucaagcaggagcugcugcagugcaaggcccaccugcacgccaacaagccccugagcgugaccgaccugaaggaggugcugggcugccuguacgagagccaggaggaggagcuggccaagguggugguggcccccuucaaggagaucagcauccaccugaccaacaccagcgaggugaugcacugcagcuucagccugaagcacugccaggaccugcagaagcugagccugcagguggccaagggcguguuccuggagaacuacauggacuucgagcuggacaucgaguucgagagaugcaccuaccugaccauccccaacugggccagacaggaccugagaagccugagacuguggaccgacuucugcagccuguucagcagcaacagcaaccugaaguuccuggaggugaagcagagcuuccugagcgacagcagcgugagaauccugugcgaccacgugaccagaagcaccugccaccugcagaagguggagaucaagaacgugacccccgacaccgccuacagagacuucugccuggccuucaucggcaagaagacccugacccaccugacccuggccggccacaucgagugggagagaaccaugaugcugaugcugugcgaccugcugagaaaccacaagugcaaccugcaguaccugagacugggcggccacugcgccacccccgagcagugggccgaguucuucuacgugcugaaggccaaccagagccugaagcaccugagacugagcgccaacgugcugcuggacgagggcgccaugcugcuguacaagaccaugaccagacccaagcacuuccugcagaugcugagccuggagaacugcagacugaccgaggccagcugcaaggaccuggccgccgugcugguggugagcaagaagcugacccaccugugccuggccaagaaccccaucggcgacaccggcgugaaguuccugugcgagggccugagcuaccccgacugcaagcugcagacccuggugcugcagcagugcagcaucaccaagcugggcugcagauaccugagcgaggcccugcaggaggccugcagccugaccaaccuggaccugagcaucaaccagaucgccagaggccuguggauccugugccaggcccuggagaaccccaacugcaaccugaagcaccugagacugaagaccuacgagaccaaccuggagaucaagaagcugcuggaggaggugaaggagaagaaccccaagcugaccaucgacugcaacgccagcggcgccaccgccccccccugcugcgacuucuucugcuga

SEQ ID NO: 9101 - RNA, 2943 nt, Artificial Sequence
  derived and/or modified sequence opt5 from NALP7__Homo_sapiens__AAL69963
augaccagcccccagcuggaguggacacuccaaacgcugcuugaacagcugaacgaggacgaacucaaguccuucaaaucucugcuuugggccuuuccccuggaggaugugcuccagaagaccccguggagcgaagucgaggaggcugacggcaaaaagcuggccgaaauccugguuaauacauccucugagaacuggauuagaaaugcgaccgugaacauccucgaagagaugaaucugacagagcuuugcaaaauggcuaaggccgaaaugauggaggauggacaggugcaagaaauugacaaccccgagcugggggaugccgaagaggacagcgagcucgcuaagccuggcgaaaaagagggguggcgcaauuccauggaaaagcagucucuggucuggaaaaacaccuucuggcagggagauaucgacaauuuucacgaugacgugacacuucggaaccagagauucauucccuuucugaauccucggacgccccgcaagcucaccccuuacaccguugugcugcacggcccggccggggucggaaaaacaacccuggcuaagaaguguaugcucgauuggacagacugcaaccugagccccacccuuagauaugccuucuaccuguccuguaaagagcucagccggaugggcccuugcucuuuugcggaacugaucuccaaggauuggcccgagcuucaagacgacaucccuagcauucuggcccaggcucagcgcauccucuucgugguugauggccuggacgagcugaaagugcccccgggggcccucauucaggauaucuguggagacugggaaaagaaaaagccuguccccgugcugcuuggcucucugcucaaaagaaagaugcugccucgggcugcccuucuggugacgacacgccccagagcgcuccgggaucugcaacugcucgcccagcagcccauuuauguccgcguugagggguuucuggaagaggacagacgggcuuacuuccuucgccacuuuggagaugaagaccaagccaugagagcuuucgagcugaugcgguccaaugccgcccucuuucagcugggcagcgcuccugcggugugcuggaucguguguaccacacugaaacuucagauggagaaaggggaagauccggucccuaccugccucaccagaacaggacuguuccugcgcuuccucuguucucgguuuccccagggcgcccaacugagaggcgcccuucgcacgcugucccuccuggcugcccaggggcugugggcucagaugagcguguuccaucgggaggaccuugaaagacucggaguucaggaguccgaucugcgccuguuucucgacggcgacauucugcggcaagauagagugucuaaggggugcuauagcuucauccaccuuuccuuucagcaguuccugaccgcccucuuuuacgcgcuggagaaagaagagggagaagaccgcgauggccaugcuugggacaucggggauguccagaagcugcuuagcggagaggaacggcucaaaaaccccgaccugauucaagugggccacuuccuguuuggccucgccaaugagaagagagccaaggagcuggaagcuacauucgggugucgcaugucuccugauaucaaacaggagcuucugcagugcaaggcccaccuccaugcuaacaaaccccuguccguuaccgaccugaaggaagugcuuggaugccucuaugagagccaggaagaggagcuggccaaagucguggucgcgccguuuaaggaaauuucuauccaccugacaaacaccagcgaggugaugcauuguuccuucucucucaagcacugccaagaucugcagaaacuuagccugcagguugccaagggcguguuucucgaaaauuacauggacuucgagcuggauauugaguucgaacgguguacguaccugacaaucccuaacugggcuagacaagaccuucggucccugcgccucuggaccgauuuuugcagccuguucucuuccaauagcaaccucaaauuucuggaggucaagcagucuuuccuuuccgacagcuccgugagaauccugugugaccacguuacccggucuacaugccaucuccagaaaguggaaauuaagaaugucacccccgauacagccuauagagacuuuugucuggcuuucaucgggaagaaaacgcugacccaccuuacacuggccggacauauugagugggaacgcaccaugaugcucaugcugugcgaucuccugcggaaccacaaguguaaucuucaguaccugagacucggcgggcauugcgcgacaccugagcaaugggccgaguuuuucuaugugcugaaagcuaaccagagccugaagcaccuucgccuguccgccaaugugcuccuggacgaaggcgcuaugcuccuguacaaaaccaugacgagacccaagcacuuucuucagaugcugucucuggagaacugucggcucaccgaagccagcugcaaagaucuggccgcuguucuugucguguccaagaagcugacacaucucugccuggcgaaaaauccuaucggagacaccggcgugaaguuccucugugaggggcugagcuaucccgauugcaaacuucagacacugguccugcaacaguguucuauuaccaagcucggaugccgcuaccuguccgaagcccuucaggaggcuuguagccugacgaaccucgaccugucuaucaaucagaucgccagaggccucuggauucugugccaagcccuugagaacccgaauuguaaccugaaacaucugcggcucaagacauaugaaaccaaccuggagaucaagaaacuucuggaagaggugaaggaaaagaauccuaagcucacaauugauugcaacgcuuccggggccaccgcgccucccuguugcgacuuuuucuguuga

SEQ ID NO: 9102 - protein, 1048 aa, Artificial Sequence
  NALP8__Homo_sapiens__Q86W28
MSDVNPPSDTPIPFSSSSTHSSHIPPWTFSCYPGSPCENGVMLYMRNVSHEELQRFKQLLLTELSTGTMPITWDQVETASWAEVVHLLIERFPGRRAWDVTSNIFAIMNCDKMCVVVRREINAILPTLEPEDLNVGETQVNLEEGESGKIRRYKSNVMEKFFPIWDITTWPGNQRDFFYQGVHRHEEYLPCLLLPKRPQGRQPKTVAIQGAPGIGKTILAKKVMFEWARNKFYAHKRWCAFYFHCQEVNQTTDQSFSELIEQKWPGSQDLVSKIMSKPDQLLLLLDGFEELTSTLIDRLEDLSEDWRQKLPGSVLLSSLLSKTMLPEATLLIMIRFTSWQTCKPLLKCPSLVTLPGFNTMEKIKYFQMYFGHTEEGDQVLSFAMENTILFSMCRVPVVCWMVCSGLKQQMERGNNLTQSCPNATSVFVRYISSLFPTRAENFSRKIHQAQLEGLCHLAADSMWHRKWVLGKEDLEEAKLDQTGVTAFLGMSILRRIAGEEDHYVFTLVTFQEFFAALFYVLCFPQRLKNFHVLSHVNIQRLIASPRGSKSYLSHMGLFLFGFLNEACASAVEQSFQCKVSFGNKRKLLKVIPLLHKCDPPSPGSGVPQLFYCLHEIREEAFVSQALNDYHKVVLRIGNNKEVQVSAFCLKRCQYLHEVELTVTLNFMNVWKLSSSSHPGSEAPESNGLHRWWQDLCSVFATNDKLEVLTMTNSVLGPPFLKALAAALRHPQCKLQKLLLRRVNSTMLNQDLIGVLTGNQHLRYLEIQHVEVESKAVKLLCRVLRSPRCRLQCLRLEDCLATPRIWTDLGNNLQGNGHLKTLILRKNSLENCGAYYLSVAQLERLSIENCNLTQLTCESLASCLRQSKMLTHLSLAENALKDEGAKHIWNALPHLRCPLQRLVLRKCDLTFNCCQDMISALCKNKTLKSLDLSFNSLKDDGVILLCEALKNPDCTLQILELENCLFTSICCQAMASMLRKNQHLRHLDLSKNAIGVYGILTLCEAFSSQKKREEVIFCIPAWTRITSFSPTPHPPDFTGKSDCLSQINP

SEQ ID NO: 9103 - RNA, 3147 nt, Artificial Sequence
  NALP8__Homo_sapiens__DAA01242
augagugacgugaauccacccucugacacccccauucccuuuucauccuccuccacucacaguucucauauuccgcccuggacauucucuugcuaccccggcuccccaugugaaaauggggucaugcuguacaugagaaacgugagccaugaggagcuacaacgguucaagcagcucuuacugacugagcucaguacuggcaccaugcccaucaccugggaccaggucgagacagccagcugggcagaggugguucaucucuugauagagcguuucccuggacgacgcgcuugggaugugacuucgaacaucuuugccauuaugaacugugauaaaauguguguuguaguccgcagagagauaaaugccauucugccuaccuuggaaccagaggacuugaaugugggagaaacacaggugaaucuggaggaaggagaaucugguaaaauacggcgguauaaaucgaaugugauggaaaaguuuuuccccauaugggacauuacgacuuggccuggaaaccagagggacuucuucuaccaagguguacacaggcacgaggaguacuuaccaugucugcuucugcccaaaagaccccaggguagacagcccaagaccguggccauacagggagcuccugggaucggaaaaacaauccuggccaaaaaggugauguuugagugggccagaaacaaguucuacgcccacaagcgcuggugugcuuucuacuuccauugccaagaggugaaccagacgacagaccagagcuucuccgagcugauugagcaaaaguggccuggaucucaggaccucgugucaaagauuauguccaaacccgaccaacuucugcugcucuuggauggcuuugaggagcucacaucuacccucauugacagacuggaggaccugagugaagacuggaggcagaaauugccugggucuguccuacugagcaguuugcugagcaaaacgaugcuuccagaggccacgcuacugaucaugauaagauuuaccucuuggcagacaugcaagcccuugcugaaaugucccucucucguaacccuuccgggguuuaauacgauggaaaaaaucaaguauuuccagauguauuuuggacacacagaggagggagaccaagucuugaguuucgccauggaaaacaccauucucuucuccaugugccgggucccugugguuugcuggauggucugcucuggucugaaacagcaaauggagagaggaaacaaucucacacagucauguccaaaugccaccucuguguucguccgguauauuucuagcuuguuucccaccagagcugagaacuuuuccagaaagauccaccaagcacaacuggaaggucugugucacuuggccgcagacagcauguggcacaggaaauggguguuagguaaagaagaucuugaggaagccaagcuggaucagacgggagucaccgccuuccuuggcaugaguauucuucggagaauugcaggugaggaagaccacuaugucuuuacccucgugacuuuucaggaauuuuuugcggccuuguuuuauguucucuguuucccacaaagacucaaaaauuuucauguguugagccacgugaauauccagcgccugauagcgagucccagaggaagcaaaagcuaucucucucacaugggacuuuucuuauucgguuuucugaacgaggccugcgcuucggccguggaacagucauuccaaugcaaggugucuuucgguaauaagaggaaacugcugaaagucauaccucuguugcauaaaugugacccaccuucuccgggcaguggggucccgcaguuauucuacugucugcaugaaauccgggaggaagccuuuguaagccaagcccuaaaugauuaucauaaaguugucuugagaauuggcaacaacaaagaaguucaagugucugcuuuuugccugaagcggugucaauauuugcaugagguggaacugaccgucacccugaacuucaugaacguguggaagcucagcuccagcucccauccuggcucugaagcgccagagagcaaugggcugcaucguugguggcaagacuuaugcucuguguuugcaacgaaugauaagcuggaaguccugacuaugaccaacaguguuuuggggccuccuuuuuugaaggcucucgcggccgcacugaggcacccucagugcaaacugcaaaagcuacuccuaaggcgugugaauagcaccauguugaaccaggacuuaaucgguguuuugacggggaaccagcaucugagauacuuggaaauacaacauguggaaguggaguccaaagcugugaagcuucuaugcagggugcugagauccccccggugccgucugcagugucucagguuggaagacugcuuggccaccccuagaauuuggacugaucuuggcaauaaucuucaagguaacgggcaucuaaagacucucauacuaagaaaaaacucccuggagaacuguggggcguauuaccugucuguggcccagcuggagaggcugucgauagagaacugcaaccuuacacagcuuacuugugaaagccuugccuccugucucaggcagaguaagaugcugacccaccugagcuuggcagaaaacgccuugaaagaugaaggggccaagcauauuuggaaugcccugccacaccugagauguccucugcagaggcugguacugagaaagugugacuugaccuuuaauugcugucaggauaugaucucugcgcucuguaaaaauaaaacccugaaaagucuugaccuaaguuuuaauagccugaaggaugauggggugauccugcugugugaggcccugaagaacccugacuguacauuacagauccuggagcuggaaaacugccuguucaccuccaucugcugccaggccauggcuuccaugcuccgcaaaaaccaacaucugagacaucuggacuugagcaagaaugcgauuggagucuaugguauucugaccuugugcgaggccuucucaagccaaaagaagagagaagaggucauuuucuguauuccugccuggacucgaauaacuagcuucuccccaacuccucacccacccgacuucacgggaaaaagugacugccuaucccagauuaauccuuag

SEQ ID NO: 9104 - RNA, 3147 nt, Artificial Sequence
  derived and/or modified sequence opt1 from NALP8__Homo_sapiens__DAA01242
augagcgacgugaacccgcccuccgacacccccauccccuucagcuccagcuccacccacagcucccacaucccgcccuggacguucagcugcuaccccggcucccccugcgagaacggggucaugcuguacaugcgcaacgugagccacgaggagcuccagcgguucaagcagcugcugcucaccgagcuguccaccggcaccaugcccaucacgugggaccagguggagaccgccagcugggccgaggucgugcaccuccucaucgagcgcuuccccgggcggcgcgcgugggacgugaccuccaacaucuucgccaucaugaacugcgacaagaugugcgucguggugcggcgcgagaucaacgccauccugcccacccuggagcccgaggaccucaacgucggcgagacccaggugaaccuggaggagggggagagcggcaagauccggcgcuacaaguccaacgugauggagaaguucuuccccaucugggacaucaccaccuggccgggcaaccagcgggacuucuucuaccaggggguccaccgccacgaggaguaccugcccugccuccugcugcccaagcggccccagggccgccagccgaagaccguggccauccagggggcccccggcaucgggaagacgauccucgcgaagaaggugauguucgagugggcccggaacaaguucuacgcccacaagcgcuggugcgccuucuacuuccacugccaggaggucaaccagaccaccgaccagagcuucuccgagcugaucgagcagaaguggcccggcagccaggaccugguguccaagaucaugagcaagcccgaccagcuccugcugcuccuggacggcuucgaggagcugaccagcacgcucaucgaccggcuggaggaccuguccgaggacuggcgccagaagcucccggggagcgugcugcuguccagccuccuguccaagaccaugcugcccgaggcgacccuccugaucaugauccgguucaccagcuggcagacgugcaagccccugcucaagugccccucccuggucacccugccgggcuucaacaccauggagaagaucaaguacuuccagauguacuucgggcacaccgaggagggcgaccaggugcucagcuucgccauggagaacacgauccuguucuccaugugccgcgugcccgucgugugcuggauggugugcagcggccugaagcagcagauggagcgggggaacaaccucacccaguccugccccaacgccaccagcgucuucgugcgcuacaucuccagccuguuccccacccgggccgagaacuucucccgcaagauccaccaggcccagcuggagggccucugccaccuggcggccgacagcauguggcaccgcaaguggguccuggggaaggaggaccucgaggaggccaagcuggaccagacgggcgugaccgccuuccuggggauguccauccugcggcgcaucgccggcgaggaggaccacuacguguucacccucgucaccuuccaggaguucuucgcggcccuguucuacgugcugugcuucccgcagcggcucaagaacuuccacgugcugagccacgucaacauccagcgccugaucgccagcccccggggcuccaagagcuaccucucccacauggggcuguuccuguucggcuuccucaacgaggccugcgccagcgcgguggagcaguccuuccagugcaaggugagcuucgggaacaagcgcaagcugcugaaggucaucccccuccugcacaagugcgacccgcccucccccggcagcggggugccccagcuguucuacugccuccacgagauccgggaggaggccuucgugucccaggcccugaacgacuaccacaaggucgugcugcgcaucggcaacaacaaggaggugcaggucagcgccuucugccucaagcggugccaguaccugcacgagguggagcugacggugacccucaacuucaugaacgucuggaagcuguccagcuccagccacccgggcuccgaggcccccgagagcaacgggcugcaccgcugguggcaggaccucugcuccguguucgcgaccaacgacaagcuggaggugcugaccaugacgaacagcguccucggcccgcccuuccugaaggcccuggccgccgcgcuccggcacccccagugcaagcugcagaagcugcuccugcgccgggugaacuccaccaugcugaaccaggaccucaucggggugcugaccggcaaccagcaccuccgcuaccuggagauccagcacgucgagguggagagcaaggccgugaagcugcugugccggguccuccgcagcccccggugccgccugcagugccugcggcucgaggacugccuggccacgccccgcaucuggaccgaccuggggaacaaccuccagggcaacggccaccugaagacgcugauccuccgcaagaacucccuggagaacugcggggccuacuaccugagcguggcccagcucgagcggcuguccaucgagaacugcaaccugacccagcugaccugcgagagccuggcguccugccugcgccagagcaagaugcucacccaccugucccuggccgagaacgcccucaaggacgagggcgccaagcacaucuggaacgcccugccccaccuccggugcccgcugcagcgccuggugcugcggaagugcgaccucacguucaacugcugccaggacaugaucagcgcgcugugcaagaacaagacccugaagucccucgaccugagcuucaacucccugaaggacgacggggucauccuccugugcgaggcccugaagaaccccgacugcacccuccagauccuggagcuggagaacugccucuucaccagcaucugcugccaggccauggccuccaugcugcgcaagaaccagcaccuccggcaccuggaccugagcaagaacgccaucggcguguacggcauccugacgcucugcgaggcguucuccagccagaagaagcgcgaggaggugaucuucugcauccccgccuggacccggaucaccuccuucagccccaccccgcacccgcccgacuucacggggaaguccgacugccugagccagaucaaccccuga

SEQ ID NO: 9105 - RNA, 3147 nt, Artificial Sequence
  derived and/or modified sequence opt2 from NALP8__Homo_sapiens__DAA01242
auguccgacgucaacccccccuccgacacccccauccccuucuccuccuccuccacccacuccucccacaucccccccuggaccuucuccugcuaccccggcucccccugcgagaacggcgucaugcucuacaugcgcaacgucucccacgaggagcuccagcgcuucaagcagcuccuccucaccgagcucuccaccggcaccaugcccaucaccugggaccaggucgagaccgccuccugggccgaggucguccaccuccucaucgagcgcuuccccggccgccgcgccugggacgucaccuccaacaucuucgccaucaugaacugcgacaagaugugcgucgucguccgccgcgagaucaacgccauccuccccacccucgagcccgaggaccucaacgucggcgagacccaggucaaccucgaggagggcgaguccggcaagauccgccgcuacaaguccaacgucauggagaaguucuuccccaucugggacaucaccaccuggcccggcaaccagcgcgacuucuucuaccagggcguccaccgccacgaggaguaccuccccugccuccuccuccccaagcgcccccagggccgccagcccaagaccgucgccauccagggcgcccccggcaucggcaagaccauccucgccaagaaggucauguucgagugggcccgcaacaaguucuacgcccacaagcgcuggugcgccuucuacuuccacugccaggaggucaaccagaccaccgaccaguccuucuccgagcucaucgagcagaaguggcccggcucccaggaccucgucuccaagaucauguccaagcccgaccagcuccuccuccuccucgacggcuucgaggagcucaccuccacccucaucgaccgccucgaggaccucuccgaggacuggcgccagaagcuccccggcuccguccuccucuccucccuccucuccaagaccaugcuccccgaggccacccuccucaucaugauccgcuucaccuccuggcagaccugcaagccccuccucaagugccccucccucgucacccuccccggcuucaacaccauggagaagaucaaguacuuccagauguacuucggccacaccgaggagggcgaccagguccucuccuucgccauggagaacaccauccucuucuccaugugccgcguccccgucgucugcuggauggucugcuccggccucaagcagcagauggagcgcggcaacaaccucacccaguccugccccaacgccaccuccgucuucguccgcuacaucuccucccucuuccccacccgcgccgagaacuucucccgcaagauccaccaggcccagcucgagggccucugccaccucgccgccgacuccauguggcaccgcaaguggguccucggcaaggaggaccucgaggaggccaagcucgaccagaccggcgucaccgccuuccucggcauguccauccuccgccgcaucgccggcgaggaggaccacuacgucuucacccucgucaccuuccaggaguucuucgccgcccucuucuacguccucugcuucccccagcgccucaagaacuuccacguccucucccacgucaacauccagcgccucaucgccuccccccgcggcuccaaguccuaccucucccacaugggccucuuccucuucggcuuccucaacgaggccugcgccuccgccgucgagcaguccuuccagugcaaggucuccuucggcaacaagcgcaagcuccucaaggucaucccccuccuccacaagugcgacccccccucccccggcuccggcgucccccagcucuucuacugccuccacgagauccgcgaggaggccuucgucucccaggcccucaacgacuaccacaaggucguccuccgcaucggcaacaacaaggagguccaggucuccgccuucugccucaagcgcugccaguaccuccacgaggucgagcucaccgucacccucaacuucaugaacgucuggaagcucuccuccuccucccaccccggcuccgaggcccccgaguccaacggccuccaccgcugguggcaggaccucugcuccgucuucgccaccaacgacaagcucgagguccucaccaugaccaacuccguccucggcccccccuuccucaaggcccucgccgccgcccuccgccacccccagugcaagcuccagaagcuccuccuccgccgcgucaacuccaccaugcucaaccaggaccucaucggcguccucaccggcaaccagcaccuccgcuaccucgagauccagcacgucgaggucgaguccaaggccgucaagcuccucugccgcguccuccgcuccccccgcugccgccuccagugccuccgccucgaggacugccucgccaccccccgcaucuggaccgaccucggcaacaaccuccagggcaacggccaccucaagacccucauccuccgcaagaacucccucgagaacugcggcgccuacuaccucuccgucgcccagcucgagcgccucuccaucgagaacugcaaccucacccagcucaccugcgagucccucgccuccugccuccgccaguccaagaugcucacccaccucucccucgccgagaacgcccucaaggacgagggcgccaagcacaucuggaacgcccucccccaccuccgcugcccccuccagcgccucguccuccgcaagugcgaccucaccuucaacugcugccaggacaugaucuccgcccucugcaagaacaagacccucaagucccucgaccucuccuucaacucccucaaggacgacggcgucauccuccucugcgaggcccucaagaaccccgacugcacccuccagauccucgagcucgagaacugccucuucaccuccaucugcugccaggccauggccuccaugcuccgcaagaaccagcaccuccgccaccucgaccucuccaagaacgccaucggcgucuacggcauccucacccucugcgaggccuucuccucccagaagaagcgcgaggaggucaucuucugcauccccgccuggacccgcaucaccuccuucucccccaccccccacccccccgacuucaccggcaaguccgacugccucucccagaucaaccccuga

SEQ ID NO: 9106 - RNA, 3147 nt, Artificial Sequence
  derived and/or modified sequence opt3 from NALP8__Homo_sapiens__DAA01242
augagcgacgugaaucccccuuccgauaccccaaucccguucucuucaaguagcacacacuccucucauauucccccuuggacuuuuucgugcuacccaggcucacccugugagaacggggucaugcuguauaugagaaacguuagccacgaggaacuccagagguucaagcaacuucuguugacggaauuaaguaccggaacaaugccuauaacuugggaccagguggagaccgccuccugggcugaaguagugcaucugcuaaucgagcgguuuccaggucgccgagcaugggaugucacaucuaauauuuucgccaucaugaacugcgacaaaaugugugugguugugcguagagagauuaaugcgauccuccccacccuggaaccugaggaucuuaacgucggcgaaacucaggugaaucuggaggagggggaaagcggaaagauaaggcgguacaaauccaacguaauggagaaguuuuucccaaucugggacauuacaaccuggccgggcaaucagcgcgacuuuuucuaucaagguguucacagacaugaagaguacuugcccugccuccugcugccuaaaaggccacaggggcggcagcccaagacgguggcuauccagggagccccuggcauuggcaagacuauccucgcaaagaaggucauguuugaaugggcccgcaacaaauucuaugcucacaagcgauggugugcauuuuacuuccacugccaagaggugaaucagaccacagaucagucauuuagugaguuaauagaacagaaauggccagggagccaagaucuggugucuaagauuauguccaagcccgaccagcuuuugcugcuacucgauggauucgaggaacugacuucaacccuuaucgacagacuggaggauuugagcgaagacuggaggcagaaacucccggguaguguccuguuaucuucccugcucagcaagacaaugcuuccugaggccacccuguugauuaugauccgguucacgucguggcaaacuuguaaaccccuacugaagugcccaucucucguuacacugccuggcuuuaacaccauggagaaaaucaaguauuuccagauguacuuugggcauacugaagagggagaccaggugcuuuccuucgcuauggaaaauacaauucuguuuucaaugugucguguacccguggucugcuggaugguguguaguggcuugaaacagcaaauggagcgcgguaacaaucucacccagagcugcccaaacgccacguccguuuucgugagauacauaucuagccuguuucccaccagggcggaaaacuucucacggaagauccaccaggcacaguuagaggggcugugccaucuagccgcugauaguauguggcaccgaaaguggguccucggaaaagaggaccuggaagaggccaaacuugaucaaacaggcgugacugcauuuuugggcauguccauucugcgcagaaucgcuggggaagaggaccacuauguauucacccucguuacauuucaggaguucuuugccgcgcuguucuacgugcuuuguuucccucagaggcugaaaaauuuucaugucuugagccacgugaacauacagcggcucauugccucuccacgcggaucaaagaguuaucugagccauauggguuuauuccuguuuggcuuccuaaaugaagcaugcgcuuccgccgucgagcaaucuuuucaguguaaagugucguucgggaacaagagaaagcuccugaaaguuaucccgcuuuugcacaagugcgaucccccuagcccaggauccggcgugccccagcuguuuuacugucuccaugaaaucagggaggaggcuuucguaucacaggcccugaaugacuaucacaaagucguguuacguauugguaacaauaaggaaguucaagugagugcauuuugccugaaacggugucaguaccuucacgaggucgaauugacugugacccucaacuucaugaauguauggaagcugucuagcuccucacauccugggagcgaggccccagaaucuaacggccuacaccgaugguggcaggaucugugcuccguguuugcuacaaaugacaagcucgagguucugaccaugacuaacaguguccuuggacccccguucuugaaagcgcuggcagccgcuuuaagacauccucaauguaagcuccagaaacugcuucugaggcgcgugaauagcacgauguugaaccaggaucucaucggcgugcugacagggaaucagcaccuacgguaucuggaaauucaacacgucgagguugagucuaaggccgugaaacuccugugcagagugcuuagguccccacgcugucgauugcagugccugcgguuagaagacugccucgcaacuccccguauauggaccgaucugggaaacaaccuucaggguaauggccaucugaagacccuaauccucagaaagaacucacuggagaauuguggggccuacuacuugaguguagcucagcuggaaagguuaagcauugagaacugcaaucucacacaacugaccugugaaucgcuugccuccugccugcgccagucuaaaauguugacucaccucagccuggcagagaacgcgcuaaaggacgagggagcuaaacauaucuggaaugcccugccucaccuucgguguccccuccagagacuggucuugaggaagugcgaccugacauuuaacuguugccaggauaugaucucagcauuauguaaaaauaagacgcucaaaagucuggaccuuuccuucaacucucugaaggaugacggcgugauuuugcucugcgaagcccugaagaauccagauuguacccuacaaauacuggagcuugaaaacugccucuucacuagcaucugcugucaggcuauggccuccaugcugcgcaaaaaucagcauuugcgacacuuagaccugucaaagaacgcaauugguguuuaugggauccucacacugugcgaggcuuuuagcagucagaaaaagcgggaggaagugauuuucuguaucccugccuggaccagaauaacaucuuuuucccccacuccacacccgccugauuucaccggcaaaagcgacugccuuucgcaaaucaaucccuga

SEQ ID NO: 9107 - RNA, 3147 nt, Artificial Sequence
  derived and/or modified sequence opt4 from NALP8__Homo_sapiens__DAA01242
augagcgacgugaacccccccagcgacacccccauccccuucagcagcagcagcacccacagcagccacaucccccccuggaccuucagcugcuaccccggcagccccugcgagaacggcgugaugcuguacaugagaaacgugagccacgaggagcugcagagauucaagcagcugcugcugaccgagcugagcaccggcaccaugcccaucaccugggaccagguggagaccgccagcugggccgagguggugcaccugcugaucgagagauuccccggcagaagagccugggacgugaccagcaacaucuucgccaucaugaacugcgacaagaugugcgugguggugagaagagagaucaacgccauccugcccacccuggagcccgaggaccugaacgugggcgagacccaggugaaccuggaggagggcgagagcggcaagaucagaagauacaagagcaacgugauggagaaguucuuccccaucugggacaucaccaccuggcccggcaaccagagagacuucuucuaccagggcgugcacagacacgaggaguaccugcccugccugcugcugcccaagagaccccagggcagacagcccaagaccguggccauccagggcgcccccggcaucggcaagaccauccuggccaagaaggugauguucgagugggccagaaacaaguucuacgcccacaagagauggugcgccuucuacuuccacugccaggaggugaaccagaccaccgaccagagcuucagcgagcugaucgagcagaaguggcccggcagccaggaccuggugagcaagaucaugagcaagcccgaccagcugcugcugcugcuggacggcuucgaggagcugaccagcacccugaucgacagacuggaggaccugagcgaggacuggagacagaagcugcccggcagcgugcugcugagcagccugcugagcaagaccaugcugcccgaggccacccugcugaucaugaucagauucaccagcuggcagaccugcaagccccugcugaagugccccagccuggugacccugcccggcuucaacaccauggagaagaucaaguacuuccagauguacuucggccacaccgaggagggcgaccaggugcugagcuucgccauggagaacaccauccuguucagcaugugcagagugcccguggugugcuggauggugugcagcggccugaagcagcagauggagagaggcaacaaccugacccagagcugccccaacgccaccagcguguucgugagauacaucagcagccuguuccccaccagagccgagaacuucagcagaaagauccaccaggcccagcuggagggccugugccaccuggccgccgacagcauguggcacagaaagugggugcugggcaaggaggaccuggaggaggccaagcuggaccagaccggcgugaccgccuuccugggcaugagcauccugagaagaaucgccggcgaggaggaccacuacguguucacccuggugaccuuccaggaguucuucgccgcccuguucuacgugcugugcuucccccagagacugaagaacuuccacgugcugagccacgugaacauccagagacugaucgccagccccagaggcagcaagagcuaccugagccacaugggccuguuccuguucggcuuccugaacgaggccugcgccagcgccguggagcagagcuuccagugcaaggugagcuucggcaacaagagaaagcugcugaaggugaucccccugcugcacaagugcgacccccccagccccggcagcggcgugccccagcuguucuacugccugcacgagaucagagaggaggccuucgugagccaggcccugaacgacuaccacaagguggugcugagaaucggcaacaacaaggaggugcaggugagcgccuucugccugaagagaugccaguaccugcacgagguggagcugaccgugacccugaacuucaugaacguguggaagcugagcagcagcagccaccccggcagcgaggcccccgagagcaacggccugcacagaugguggcaggaccugugcagcguguucgccaccaacgacaagcuggaggugcugaccaugaccaacagcgugcugggcccccccuuccugaaggcccuggccgccgcccugagacacccccagugcaagcugcagaagcugcugcugagaagagugaacagcaccaugcugaaccaggaccugaucggcgugcugaccggcaaccagcaccugagauaccuggagauccagcacguggagguggagagcaaggccgugaagcugcugugcagagugcugagaagccccagaugcagacugcagugccugagacuggaggacugccuggccacccccagaaucuggaccgaccugggcaacaaccugcagggcaacggccaccugaagacccugauccugagaaagaacagccuggagaacugcggcgccuacuaccugagcguggcccagcuggagagacugagcaucgagaacugcaaccugacccagcugaccugcgagagccuggccagcugccugagacagagcaagaugcugacccaccugagccuggccgagaacgcccugaaggacgagggcgccaagcacaucuggaacgcccugccccaccugagaugcccccugcagagacuggugcugagaaagugcgaccugaccuucaacugcugccaggacaugaucagcgcccugugcaagaacaagacccugaagagccuggaccugagcuucaacagccugaaggacgacggcgugauccugcugugcgaggcccugaagaaccccgacugcacccugcagauccuggagcuggagaacugccuguucaccagcaucugcugccaggccauggccagcaugcugagaaagaaccagcaccugagacaccuggaccugagcaagaacgccaucggcguguacggcauccugacccugugcgaggccuucagcagccagaagaagagagaggaggugaucuucugcauccccgccuggaccagaaucaccagcuucagccccaccccccacccccccgacuucaccggcaagagcgacugccugagccagaucaaccccuga

SEQ ID NO: 9108 - RNA, 3147 nt, Artificial Sequence
  derived and/or modified sequence opt5 from NALP8__Homo_sapiens__DAA01242
augagcgacgugaaucccccuuccgauaccccgauccccuucucuagcuccucuacacacagcucccauauuccucccuggacguuuucuugcuacccuggcagccccugugagaacggggucaugcuguauaugagaaacguuucccacgaggaacuccagcgguucaagcaacugcuucugaccgaacucagcacaggaaccaugccuaucacaugggaccagguggagaccgccucuugggcugaagugguccaucugcuuauugagcgcuuuccgggcagacgggccugggaugugacauccaauaucuucgcgauuaugaacugcgacaaaauguguguugugguccgcagagagaucaaugcuauccugcccacccucgaaccugaggaucugaacgugggggaaacgcagguuaaucuggaggagggagaaagcggcaagauucggcgcuacaaaucuaacgugauggagaaguuuuuccccaucugggacauuaccacauggccugggaaucagagagacuuuuucuaucaaggaguccaccggcaugaagaguaccuccccugccugcuucugccgaaacgcccucagggcagacagcccaagaccguggccauccagggcgccccugggauuggaaagacaauccucgcuaaaaaggugauguuugaaugggcccggaacaaauucuaugcucacaagcgcuggugugccuuuuacuuccacugccaagaggucaaucagaccacggaucaguccuuuagcgagcugauugaacagaaauggcccggcucucaagaucuuguuuccaagaucaugagcaagcccgaccagcugcuccugcugcucgauggguucgaggaacugacauccacccuuaucgacagacuggaggaucucucugaagacuggcggcagaaacugccuggaagcgugcuucuguccagccuccugucuaagacaaugcugccggaggcgacccuccugauuaugauccgcuucaccuccuggcaaacauguaaaccccuucugaagugcccuagccucgugacgcugcccggcuuuaacaccauggagaaaauuaaguauuuccagauguacuuugggcauacagaagagggagaccagguccuuucuuucgccauggaaaauaccauccuguuuagcauguguagagugccuguugugugcuggauggucuguuccggccucaaacagcaaauggagcggggcaacaaucugacacagucuugccccaacgcuaccagcguguucguuagauacauuuccagccuguuuccgacgcgcgccgaaaacuucucucggaagauccaccaggcucagcucgaggggcugugccaucuugccgcggauuccauguggcacagaaagugggugcugggaaaagaggaccucgaagaggccaagcuggaucaaacaggcgucaccgcuuuucuggggaugagcauccuucgccggauugccggagaagaggaccacuauguguucacccucgucacauuucaggaguucuuugcugcccuguucuacgugcuguguuucccucagagacucaaaaauuuucauguucugucucacgugaacauccagcgccuuauugccagcccccggggcagcaaguccuaucugucucauaugggacucuuccuguuuggguuccugaaugaggcuugcgcgagcgccgucgaacaauccuuucaguguaaagugucuuucggcaacaagagaaaacuucucaaaguuaucccucugcugcacaagugcgaucccccuagccccggcuccggggugccgcagcucuuuuacugucugcaugaaauucgcgaggaggcuuucgucagccaggcccuuaaugacuaucacaaaguggugcugcggaucggaaacaauaaggaaguucaagucucugccuuuugccucaaaagaugucaguaccugcacgagguggaacugaccgugacacuuaacuucaugaaugucuggaagcucuccuccucuucccauccuggcagcgaggcucccgaaucuaacgggcugcaccgcugguggcaggaucugugcagcguguuugccacgaaugacaagcucgagguucugaccaugacaaacuccgugcuuggacccccuuuccugaaagcgcucgcugccgcccugcggcauccgcaauguaagcugcagaaacuucuccugagacgggucaauagcaccaugcugaaccaggaucucaucggcgugcugacagggaaucagcaccuucgcuaucuggaaauucaacacguugagguggagucuaaggcugucaaacuccugugcagagugcugcggucccccagaugucgccuucagugccugcggcucgaagacugccuggccaccccuagaaucuggacggaucucggcaacaaccugcagggaaauggccaucuuaagacccugauucuccgcaagaacagccuggagaauuguggggcuuacuaccuguccguugcccagcuugaaagacugucuaucgagaacugcaaucucacacaacugaccugugaaagccucgcguccugccugcggcagucuaaaaugcuuacacaccugagccucgccgagaacgcucugaaggacgagggagccaaacauauuuggaaugcucugccccaccuucgcuguccucugcagagacucgugcugcggaagugcgaccucaccuuuaacuguugccaggauaugaucuccgcccuguguaaaaauaagacgcuuaaaucucuggaccugagcuucaacucccucaaggaugacggcgucauucugcuuugcgaagcgcugaagaaucccgauuguacacuccaaauccuggagcucgaaaacugccuguucaccagcaucugcugucaggccauggcuucuaugcuucgcaaaaaucagcaucugagacaccuggaccucuccaagaacgccauugggguguauggaauccugacacuuugcgaggcuuuuagcucucaaaagaagcgggaggaagugauuuucuguaucccugccuggacccgcauuaccuccuuuagccccacaccgcacccucccgauuucacgggcaaaucugacugccugucccagaucaauccuuga

SEQ ID NO: 9109 - protein, 991 aa, Artificial Sequence
  NALP9__Homo_sapiens__Q7RTR0
MAESFFSDFGLLWYLKELRKEEFWKFKELLKQPLEKFELKPIPWAELKKASKEDVAKLLDKHYPGKQAWEVTLNLFLQINRKDLWTKAQEEMRNKLNPYRKHMKETFQLIWEKETCLHVPEHFYKETMKNEYKELNDAYTAAARRHTVVLEGPDGIGKTTLLRKVMLDWAEGNLWKDRFTFVFFLNVCEMNGIAETSLLELLSRDWPESSEKIEDIFSQPERILFIMDGFEQLKFNLQLKADLSDDWRQRQPMPIILSSLLQKKMLPESSLLIALGKLAMQKHYFMLRHPKLIKLLGFSESEKKSYFSYFFGEKSKALKVFNFVRDNGPLFILCHNPFTCWLVCTCVKQRLERGEDLEINSQNTTYLYASFLTTVFKAGSQSFPPKVNRARLKSLCALAAEGIWTYTFVFSHGDLRRNGLSESEGVMWVGMRLLQRRGDCFAFMHLCIQEFCAAMFYLLKRPKDDPNPAIGSITQLVRASVVQPQTLLTQVGIFMFGISTEEIVSMLETSFGFPLSKDLKQEITQCLESLSQCEADREAIAFQELFIGLFETQEKEFVTKVMNFFEEVFIYIGNIEHLVIASFCLKHCQHLTTLRMCVENIFPDDSGCISDYNEKLVYWRELCSMFITNKNFQILDMENTSLDDPSLAILCKALAQPVCKLRKLIFTSVYFGHDSELFKAVLHNPHLKLLSLYGTSLSQSDIRHLCETLKHPMCKIEELILGKCDISSEVCEDIASVLACNSKLKHLSLVENPLRDEGMTLLCEALKHSHCALERLMLMYCCLTSVSCDSISEVLLCSKSLSLLDLGSNALEDNGVASLCAALKHPGCSIRELWLMGCFLTSDSCKDIAAVLICNGKLKTLKLGHNEIGDTGVRQLCAALQHPHCKLECLGLQTCPITRACCDDIAAALIACKTLRSLNLDWIALDADAVVVLCEALSHPDCALQMLGLHKSGFDEETQKILMSVEEKIPHLTISHGPWIDEEYKIRGVLL

SEQ ID NO: 9110 - RNA, 2976 nt, Artificial Sequence
  NALP9__Homo_sapiens__AAI36584
auggcagaaucuuuuuuuucggauuuuggcuuguugugguaucugaaggagcucagaaaggaagaguuuuggaaauuuaaggagcuccucaaacaaccuuuggagaaauuugaacucaagccaauccccugggcugagcugaagaaggccuccaaagaagauguagcaaagcugcuggacaaacauuacccaggaaagcaggcaugggagguaacacugaaccuguuucuacagaucaauaggaaagaucucuggacaaaggcucaggaagagaugagaaauaagcuaaacccauacagaaagcauaugaaggaaacauuucaacucauaugggagaaggaaaccugucuucacgucccugagcauuucuacaaagaaaccaugaaaaaugaguauaaagaauugaaugacgcauauacugcugcggcuagacgacacacugugguccuggaagguccugauggaauuggaaaaacaacccuuuuaagaaaagugauguuggacugggcagagggaaacuuauggaaggacagguucacauuuguguuuuuccucaaugucugugaaaugaacgguaucgcagagaccagcuuacuggagcuccucucuagggacuggccggagucuucagagaagaucgaagacauuuuuucccagccagagagaauucuguucaucauggauggcuuugagcaacugaaguuuaacuuacaacuuaaggcugacuugagcgaugauuggaggcagcggcagccaaugccaauuauccugagcaguuuguugcaaaaaaagaugcuuccagaauccucucuccuuauugcauuaggaaaacuggcuaugcaaaaacacuauuuuauguugcggcauccaaaacucauaaagcucuuaggauucagugaaucugaaaagaagucguauuucuccuacuucuuuggugagaagagcaaagcccugaaagucuucaauuuugugagagauaaugggccgcuguuuaucuugugccauaaucccuuuacgugcugguuggucuguacuugugugaaacagaggcuagagaggggagaagaccuugaaauaaacucccaaaacaccaccuauuuauaugcauccuuuuuaacaacuguauucaaagcaggaagucagaguuuuccaccuaaggugaacagagcccgacuaaaaagccugugugcuuuggcugcagagggaauuuggacauauacauuuguauuuucccauggggaucuccggaggaauggguuaucugagucugagggcgugauguggguggguaugagacuccuccaaaggagaggggacuguuuugccuucaugcaucuguguauccaagaguuuugugccgccauguuuuauuugcucaaacgacccaaagacgauccuaacccggccauuggaagcauaacccagcuuguaagagcaagugugguucagccucaaacccucuugacccagguggggauauucauguuuggaauuucaacagaagaaaucgucagcaugcuggagaccuccuuugguuuuccacugucaaaagaccuaaagcaggaaauaacccaaugccuugaaaguuuaagucaaugugaagcugauagggaagccauagcuuuccaggaacuauucauugguuuguuugaaacucaggaaaaagaauuuguaaccaaagugaugaauuucuuugaagaaguuuucauuuauauugguaacauagaacauuugguaauagcuucauucugccugaagcauugucaacauuuaacgacacuucgcauguguguggagaauaucuuuccagaugacucaggaugcaucucagauuacaaugagaagcucgucuacuggcgggagcuuugcucaauguucauuaccaacaagaacuuccagauuuuagacauggaaaauaccagccucgaugaucccucccuggcgauucuuugcaaagcgcuggcucagccuguuuguaaacuccgaaaacucauauuuacuucuguguacuuuggacaugauucagaauuauuuaaggcaguucuucacaacccucaucugaaacuucugagccuguacggcacuagccucucccagucugacaucagacaccugugugagacgcugaaacauccaaugugcaagauagaagagcugauacugggaaagugugacaucuccagugaaguuugugaagacaucgccuccguccuggccugcaacagcaagcugaaacaccucuccuugguagaaaaucccuugagggacgaaggaaugacguugcugugugaagcccugaagcacucacacugugcccuggagaggcugauguugauguacugcugucucaccucugucuccugugacuccauuuccgaaguccucuugugcaguaagucccugucccuccucgaucugggcucaaaugcccuggaagauaauggaguggcaucucugugugcagcgcugaagcacccaggcugcagcauacgggagcugugguugaugggcuguuuccuuacuuccgauuccuguaaggacauugcugcuguucuuauuugcaaugggaaacugaagacccugaaacuugggcauaaugaaauaggagacacuggugucagacaguuaugugcagcuuugcagcauccucacuguaaauuagagugucucgggcugcaaacguguccgaucacccgugccugcugcgacgacaucgccgcagcacucaucgccugcaaaacacugaggagccugaaccucgacuggauugccuuggaugcugaugcagugguggugcugugugaggcauugagccacccggacugugcccugcagaugcuggggcugcacaaaucuggcuuugaugaagaaacucagaagauccugaugucuguggaagaaaaaauuccccaucugaccauuucacauggaccuuggauugacgaggaauacaagaucaggggugugcuccucuga

SEQ ID NO: 9111 - RNA, 2976 nt, Artificial Sequence
  derived and/or modified sequence opt1 from NALP9__Homo_sapiens__AAI36584
auggccgagagcuucuucuccgacuucggccugcucugguaccugaaggagcugcggaaggaggaguucuggaaguucaaggagcuccugaagcagccccuggagaaguucgagcucaagccgauccccugggccgagcugaagaaggcgagcaaggaggacguggccaagcugcucgacaagcacuaccccgggaagcaggccugggaggucacccugaaccuguuccuccagaucaaccggaaggaccuguggaccaaggcccaggaggagaugcgcaacaagcugaaccccuaccggaagcacaugaaggagacguuccagcucaucugggagaaggagaccugccugcacgugccggagcacuucuacaaggagaccaugaagaacgaguacaaggagcugaacgacgccuacaccgcggccgcccgccggcacacggugguccucgagggccccgacgggaucggcaagaccacccugcugcgcaaggugaugcucgacugggccgaggggaaccuguggaaggaccgguucaccuucguguucuuccugaacgucugcgagaugaacggcaucgcggagacgucccuccuggagcugcucagccgcgacuggcccgaguccagcgagaagaucgaggacaucuucucccagcccgagcggauccuguucaucauggacggcuucgagcagcugaaguucaaccuccagcugaaggccgaccugagcgacgacuggcgccagcggcagccgaugcccaucauccucuccagccugcugcagaagaagaugcuccccgaguccagccugcugaucgcccucgggaagcuggccaugcagaagcacuacuucaugcugcgccaccccaagcucaucaagcugcugggcuucuccgagagcgagaagaaguccuacuucagcuacuucuucggggagaaguccaaggcccucaagguguucaacuucgugcgggacaacggcccgcuguucauccugugccacaaccccuucacgugcuggcucgucugcacgugcgugaagcagcgccuggagcgcggggaggaccuggagaucaacagccagaacaccaccuaccuguacgcguccuuccucaccaccguguucaaggccggcagccagagcuucccgcccaaggucaaccgggcccggcugaagucccugugcgcccucgccgcggagggcaucuggaccuacaccuucguguucagccacggggaccugcgccggaacggccuguccgagagcgagggggugaugugggucggcaugcgccuccugcagcggcgcggcgacugcuucgccuucaugcaccugugcauccaggaguucugcgccgccauguucuaccuccugaagcgccccaaggacgaccccaaccccgccaucggguccaucacccagcuggugcgggcgagcgugguccagccccagacccuccugacccaggugggcaucuucauguucgggaucuccacggaggagaucgugagcaugcuggagaccuccuucggcuucccgcucagcaaggaccugaagcaggagaucacccagugccuggagucccucagccagugcgaggccgaccgcgaggccaucgccuuccaggagcuguucaucgggcuguucgagacccaggagaaggaguucgucacgaaggugaugaacuucuucgaggagguguucaucuacaucggcaacaucgagcaccucgucaucgccuccuucugccugaagcacugccagcaccugaccacccuccggaugugcguggagaacaucuuccccgacgacagcggcugcaucuccgacuacaacgagaagcuggucuacuggcgcgagcugugcagcauguucaucaccaacaagaacuuccagauccucgacauggagaacacgucccuggacgaccccagccuggcgauccucugcaaggcccuggcccagcccgugugcaagcugcggaagcucaucuucaccuccguguacuucgggcacgacagcgagcuguucaaggccguccugcacaacccgcaccucaagcugcugagccucuacggcaccucccugagccaguccgacauccgccaccugugcgagacccucaagcaccccaugugcaagaucgaggagcugauccuggggaagugcgacaucagcuccgaggugugcgaggacaucgcgagcgugcucgccugcaacuccaagcugaagcaccugagccucgucgagaacccccugcgggacgagggcaugacgcugcucugcgaggcccugaagcacucccacugcgcccuggagcgccucaugcugauguacugcugccugaccagcguguccugcgacagcaucuccgaggugcuccugugcagcaagucccugagccuccuggaccugggguccaacgcccucgaggacaacggcgucgcgagccugugcgccgcccugaagcaccccggcugcagcauccgggagcucuggcugauggggugcuuccugaccuccgacagcugcaaggacaucgccgccgugcucaucugcaacggcaagcugaagacccugaagcucgggcacaacgagaucggcgacacgggggugcgccagcugugcgcggcccugcagcacccgcacugcaagcucgagugccugggccugcagaccugccccaucacccgggccugcugcgacgacaucgccgccgcgcucaucgccugcaagacccugcgcucccugaaccucgacuggaucgcccuggacgccgacgcggucguggugcugugcgaggcccucagccaccccgacugcgcccugcagaugcugggccuccacaaguccggguucgacgaggagacccagaagauccugaugagcgucgaggagaagaucccgcaccugacgaucucccacggccccuggaucgacgaggaguacaagauccgcggggugcuccuguga

SEQ ID NO: 9112 - RNA, 2976 nt, Artificial Sequence
  derived and/or modified sequence opt2 from NALP9__Homo_sapiens__AAI36584
auggccgaguccuucuucuccgacuucggccuccucugguaccucaaggagcuccgcaaggaggaguucuggaaguucaaggagcuccucaagcagccccucgagaaguucgagcucaagcccauccccugggccgagcucaagaaggccuccaaggaggacgucgccaagcuccucgacaagcacuaccccggcaagcaggccugggaggucacccucaaccucuuccuccagaucaaccgcaaggaccucuggaccaaggcccaggaggagaugcgcaacaagcucaaccccuaccgcaagcacaugaaggagaccuuccagcucaucugggagaaggagaccugccuccacguccccgagcacuucuacaaggagaccaugaagaacgaguacaaggagcucaacgacgccuacaccgccgccgcccgccgccacaccgucguccucgagggccccgacggcaucggcaagaccacccuccuccgcaaggucaugcucgacugggccgagggcaaccucuggaaggaccgcuucaccuucgucuucuuccucaacgucugcgagaugaacggcaucgccgagaccucccuccucgagcuccucucccgcgacuggcccgaguccuccgagaagaucgaggacaucuucucccagcccgagcgcauccucuucaucauggacggcuucgagcagcucaaguucaaccuccagcucaaggccgaccucuccgacgacuggcgccagcgccagcccaugcccaucauccucuccucccuccuccagaagaagaugcuccccgaguccucccuccucaucgcccucggcaagcucgccaugcagaagcacuacuucaugcuccgccaccccaagcucaucaagcuccucggcuucuccgaguccgagaagaaguccuacuucuccuacuucuucggcgagaaguccaaggcccucaaggucuucaacuucguccgcgacaacggcccccucuucauccucugccacaaccccuucaccugcuggcucgucugcaccugcgucaagcagcgccucgagcgcggcgaggaccucgagaucaacucccagaacaccaccuaccucuacgccuccuuccucaccaccgucuucaaggccggcucccaguccuucccccccaaggucaaccgcgcccgccucaagucccucugcgcccucgccgccgagggcaucuggaccuacaccuucgucuucucccacggcgaccuccgccgcaacggccucuccgaguccgagggcgucaugugggucggcaugcgccuccuccagcgccgcggcgacugcuucgccuucaugcaccucugcauccaggaguucugcgccgccauguucuaccuccucaagcgccccaaggacgaccccaaccccgccaucggcuccaucacccagcucguccgcgccuccgucguccagccccagacccuccucacccaggucggcaucuucauguucggcaucuccaccgaggagaucgucuccaugcucgagaccuccuucggcuucccccucuccaaggaccucaagcaggagaucacccagugccucgagucccucucccagugcgaggccgaccgcgaggccaucgccuuccaggagcucuucaucggccucuucgagacccaggagaaggaguucgucaccaaggucaugaacuucuucgaggaggucuucaucuacaucggcaacaucgagcaccucgucaucgccuccuucugccucaagcacugccagcaccucaccacccuccgcaugugcgucgagaacaucuuccccgacgacuccggcugcaucuccgacuacaacgagaagcucgucuacuggcgcgagcucugcuccauguucaucaccaacaagaacuuccagauccucgacauggagaacaccucccucgacgaccccucccucgccauccucugcaaggcccucgcccagcccgucugcaagcuccgcaagcucaucuucaccuccgucuacuucggccacgacuccgagcucuucaaggccguccuccacaacccccaccucaagcuccucucccucuacggcaccucccucucccaguccgacauccgccaccucugcgagacccucaagcaccccaugugcaagaucgaggagcucauccucggcaagugcgacaucuccuccgaggucugcgaggacaucgccuccguccucgccugcaacuccaagcucaagcaccucucccucgucgagaacccccuccgcgacgagggcaugacccuccucugcgaggcccucaagcacucccacugcgcccucgagcgccucaugcucauguacugcugccucaccuccgucuccugcgacuccaucuccgagguccuccucugcuccaagucccucucccuccucgaccucggcuccaacgcccucgaggacaacggcgucgccucccucugcgccgcccucaagcaccccggcugcuccauccgcgagcucuggcucaugggcugcuuccucaccuccgacuccugcaaggacaucgccgccguccucaucugcaacggcaagcucaagacccucaagcucggccacaacgagaucggcgacaccggcguccgccagcucugcgccgcccuccagcacccccacugcaagcucgagugccucggccuccagaccugccccaucacccgcgccugcugcgacgacaucgccgccgcccucaucgccugcaagacccuccgcucccucaaccucgacuggaucgcccucgacgccgacgccgucgucguccucugcgaggcccucucccaccccgacugcgcccuccagaugcucggccuccacaaguccggcuucgacgaggagacccagaagauccucauguccgucgaggagaagaucccccaccucaccaucucccacggccccuggaucgacgaggaguacaagauccgcggcguccuccucuga

SEQ ID NO: 9113 - RNA, 2976 nt, Artificial Sequence
  derived and/or modified sequence opt3 from NALP9__Homo_sapiens__AAI36584
auggccgagagcuucuuuuccgacuucggccugcucugguaccuuaaggaacugagaaaagaggaauuuuggaaguucaaagaguuguuaaagcagccccuggaaaaauuugagcuaaagccuaucccaugggcugagcucaagaaagcaucuaaggaagauguggccaaacugcuugacaagcacuauccggggaaacaagcgugggaggucacccugaacuuguuccuccagauuaauaggaaggaucuguggacaaaggcucaggaagagaugcggaacaaacugaaucccuaccgcaagcauaugaaagagacuuuucagcucauaugggaaaaggagacgugcuuacacguuccugaacauuucuauaaagagaccaugaagaacgaauacaaagagcugaaugacgccuauacagcagccgcucgacgucacacugugguacuugagggaccagaugguaucggcaagaccacauugcugagaaaggugaugcuagacugggcagaagggaaccucuggaaagauagguuuaccuucgucuuuuuccugaaugugugugagaugaacggaauugccgaaacuucacuucuggaguugcucagucgggacuggcccgaaagcuccgagaagaucgaggauauuuuuagccaaccugaacgcauccuguucauaauggacggcuucgagcaguuaaaauuuaaucugcagcucaaggcugaucuuucggacgauuggagacagaggcaaccaaugcccaucauucugucaucuuugcuacagaaaaagaugcugccugaaaguucccuccugaucgcccuugguaagcuggcgaugcagaaacauuacuucauguugcggcacccaaagcucauuaaacuguuaggguuuucugagagcgaaaagaaauccuauuucucauacuuuuucggagagaagaguaaggcacugaaaguuuuuaacuucgugcgcgacaauggcccgcuauuuauccucugccacaaccccuucacauguuggcuggucugcaccugugugaagcagcgacuugagagaggcgaagacuuggagauaaauagccaaaacacgacuuaccuguaugccucuuuucucaccacaguauucaaagcugggucccagucauuuccuccaaagguuaauagggcccggcugaaaagccuuugcgcacuggcugccgaaggaauuuggacuuacaccuucguguucagucauggugauuugcgucgcaacggccucucugaguccgagggggucaugugggugggaaugagacuguuacagaggcggggcgacuguuuugcguucaugcaccugugcauccaagaauuuugugccgcaauguucuaucuacucaagcgacccaaggaugacccuaacccagcuauugguagcaucacacagcuggugcgcgccucggucguucagccccagacccuuuugacgcaaguggggaucuuuauguucggaauuucuacugaggaaauaguauccaugcuggagacaucauuuggcuucccgcucaguaaagaucugaagcaggaaaucacccagugcuuagagagccugucccagugugaggcugacagagaagccauugcauuucaagagcuuuucaucggcuuguuugaaacucaggagaaagaauuugugacaaaggucaugaauuucuucgaggagguguucauauacauugggaacaucgaacaucucguuaucgccucuuuuugccugaaacacugccagcaccuaaccacgcugaggauguguguggagaauauuuucccugaugacagcggaugcaucucagauuauaacgaaaagcucgucuacuggcgggagcuguguaguauguuuauuaccaauaaaaacuuccagauacuugacauggaaaauacauccuuggaugaccccagccuggcuaucuuaugcaaggcgcucgcacaaccaguguguaagcugcgcaaacuuauuuuuacuucuguauauuucggucaugacucagagcuguuuaaggccguuuugcacaacccucaucucaaacugcuaagucuguacggcaccagccucucccagucugauaucagacaccugugcgagacacuuaagcaucccauguguaaaaucgaagaguugauucuggggaagugcgacauaucgagcgaagugugugaggauaucgcuuccgucuuagccugcaauucaaagcucaaacaccugagucuuguggagaacccacugagggacgaaggaaugacucuacucugugaggcacugaagcacucucauugcgccuuggaacgucugauguuaauguacugcugucucaccagcgucuccugcgauucaauuagcgaggugcugcuuuguucuaaaucccugaguuugcucgaccugggcagcaaugcucuagaagauaacgguguugccucucugugcgcagcgcuuaagcaccccggguguuccauccgggagcucuggcugaugggcugcuucuugacaucagacaguuguaaagauauugcugccgugcugaucugcaauggaaaguuaaagacccucaaacugggccauaacgagauaggggacacuggaguacgacagcuuugugcagcccugcagcacccucacugcaaguuggaaugucucggucugcaaacgugcccaaucacaagagcuugcugugaugacauugccgcagcucuaaucgccugcaaaacccugaggagccuuaaucucgauuggauugcgcuggacgccgacgcugucgugguuuugugugaggcauuaucgcauccggauugcgcccugcagaugcucggccugcacaaguccggguuugacgaagagacucagaaaauccuuaugucuguggaagagaagauaccccaucugaccauuagccacggaccuuggaucgaugaggaauauaagauucgcggcgucuugcuauga

SEQ ID NO: 9114 - RNA, 2976 nt, Artificial Sequence
  derived and/or modified sequence opt4 from NALP9__Homo_sapiens__AAI36584
auggccgagagcuucuucagcgacuucggccugcugugguaccugaaggagcugagaaaggaggaguucuggaaguucaaggagcugcugaagcagccccuggagaaguucgagcugaagcccauccccugggccgagcugaagaaggccagcaaggaggacguggccaagcugcuggacaagcacuaccccggcaagcaggccugggaggugacccugaaccuguuccugcagaucaacagaaaggaccuguggaccaaggcccaggaggagaugagaaacaagcugaaccccuacagaaagcacaugaaggagaccuuccagcugaucugggagaaggagaccugccugcacgugcccgagcacuucuacaaggagaccaugaagaacgaguacaaggagcugaacgacgccuacaccgccgccgccagaagacacaccguggugcuggagggccccgacggcaucggcaagaccacccugcugagaaaggugaugcuggacugggccgagggcaaccuguggaaggacagauucaccuucguguucuuccugaacgugugcgagaugaacggcaucgccgagaccagccugcuggagcugcugagcagagacuggcccgagagcagcgagaagaucgaggacaucuucagccagcccgagagaauccuguucaucauggacggcuucgagcagcugaaguucaaccugcagcugaaggccgaccugagcgacgacuggagacagagacagcccaugcccaucauccugagcagccugcugcagaagaagaugcugcccgagagcagccugcugaucgcccugggcaagcuggccaugcagaagcacuacuucaugcugagacaccccaagcugaucaagcugcugggcuucagcgagagcgagaagaagagcuacuucagcuacuucuucggcgagaagagcaaggcccugaagguguucaacuucgugagagacaacggcccccuguucauccugugccacaaccccuucaccugcuggcuggugugcaccugcgugaagcagagacuggagagaggcgaggaccuggagaucaacagccagaacaccaccuaccuguacgccagcuuccugaccaccguguucaaggccggcagccagagcuucccccccaaggugaacagagccagacugaagagccugugcgcccuggccgccgagggcaucuggaccuacaccuucguguucagccacggcgaccugagaagaaacggccugagcgagagcgagggcgugaugugggugggcaugagacugcugcagagaagaggcgacugcuucgccuucaugcaccugugcauccaggaguucugcgccgccauguucuaccugcugaagagacccaaggacgaccccaaccccgccaucggcagcaucacccagcuggugagagccagcguggugcagccccagacccugcugacccaggugggcaucuucauguucggcaucagcaccgaggagaucgugagcaugcuggagaccagcuucggcuucccccugagcaaggaccugaagcaggagaucacccagugccuggagagccugagccagugcgaggccgacagagaggccaucgccuuccaggagcuguucaucggccuguucgagacccaggagaaggaguucgugaccaaggugaugaacuucuucgaggagguguucaucuacaucggcaacaucgagcaccuggugaucgccagcuucugccugaagcacugccagcaccugaccacccugagaaugugcguggagaacaucuuccccgacgacagcggcugcaucagcgacuacaacgagaagcugguguacuggagagagcugugcagcauguucaucaccaacaagaacuuccagauccuggacauggagaacaccagccuggacgaccccagccuggccauccugugcaaggcccuggcccagcccgugugcaagcugagaaagcugaucuucaccagcguguacuucggccacgacagcgagcuguucaaggccgugcugcacaacccccaccugaagcugcugagccuguacggcaccagccugagccagagcgacaucagacaccugugcgagacccugaagcaccccaugugcaagaucgaggagcugauccugggcaagugcgacaucagcagcgaggugugcgaggacaucgccagcgugcuggccugcaacagcaagcugaagcaccugagccugguggagaacccccugagagacgagggcaugacccugcugugcgaggcccugaagcacagccacugcgcccuggagagacugaugcugauguacugcugccugaccagcgugagcugcgacagcaucagcgaggugcugcugugcagcaagagccugagccugcuggaccugggcagcaacgcccuggaggacaacggcguggccagccugugcgccgcccugaagcaccccggcugcagcaucagagagcuguggcugaugggcugcuuccugaccagcgacagcugcaaggacaucgccgccgugcugaucugcaacggcaagcugaagacccugaagcugggccacaacgagaucggcgacaccggcgugagacagcugugcgccgcccugcagcacccccacugcaagcuggagugccugggccugcagaccugccccaucaccagagccugcugcgacgacaucgccgccgcccugaucgccugcaagacccugagaagccugaaccuggacuggaucgcccuggacgccgacgccgugguggugcugugcgaggcccugagccaccccgacugcgcccugcagaugcugggccugcacaagagcggcuucgacgaggagacccagaagauccugaugagcguggaggagaagaucccccaccugaccaucagccacggccccuggaucgacgaggaguacaagaucagaggcgugcugcuguga

SEQ ID NO: 9115 - RNA, 2976 nt, Artificial Sequence
  derived and/or modified sequence opt5 from NALP9__Homo_sapiens__AAI36584
auggccgagagcuucuuuuccgacuucggccugcucugguaccugaaggaacuuagaaaagaggaauuuuggaaguucaaagagcugcucaagcagccccuggaaaaauuugagcuuaagccuaucccgugggcugagcugaagaaagccucuaaggaagauguggcgaaacuccuggacaagcacuaucccgggaaacaggcuugggaggucacccugaaccucuuccugcaaauuaaucggaaggaucuuuggacaaaggcccaggaagagaugcgcaacaaacugaauccuuacagaaagcauaugaaagagacguuucagcucaucugggaaaaggagaccugccugcacguucccgaacauuucuauaaagagacaaugaagaacgaauacaaagagcuuaaugacgccuauaccgcugccgcucggcgccacacaguggugcuggagggaccugauggcauugggaagaccacacuccugagaaaggucaugcuggacugggccgaaggaaaccucuggaaagaucgguuuaccuucguguuuuuccugaauguuugugagaugaacggcaucgcggaaacgagccuucuggagcuccugucccgcgacuggcccgaaucuagcgagaagauugaggauaucuuuucccaaccugaaagaauccuuuucauuauggacggguucgagcagcugaaauuuaaucuccagcugaaggccgaucugucugacgauuggcggcagcgccaaccgaugcccaucauucucagcucccugcuucagaaaaagaugcugccugaaagcucucuccugaucgcucuuggaaagcuggccaugcagaaacauuacuucaugcucagacaccccaagcugauuaaacugcucggcuuuuccgagagcgaaaagaaaucuuauuucuccuacuuuuucggcgaaaagagcaaggcucugaaaguguuuaacuucguccgggacaaugggccucuuuuuauccugugccacaaccccuucaccuguuggcucgugugcacauguguuaagcagcgccuggagagaggagaagaccuggagauuaauucucaaaacaccacauaccuuuaugccuccuuucucaccacgguguucaaagcgggcagccaguccuuuccgccuaaggucaaucgggcccgccugaaaucucugugcgcucucgccgcugaagggaucuggacauacaccuucguguucagccauggagaucugagacggaacggccuuuccgagagcgagggggugaugugggucggaaugagacugcuccagcgccggggcgacuguuuugccuucaugcaccugugcauccaagaauuuugugccgcuauguucuaucugcuuaagagacccaaggaugacccuaaccccgcgauuggcucuaucacacagcucguucgcgccuccguggugcagccccagacccugcugacccaagucgggauuuuuauguucggaaucagcacagaggaaauugugucuaugcucgagacgagcuuuggcuucccucuguccaaagaucuuaagcaggaaaucacccagugccuggagucucucagccagugugaggcugaccgggaagccaucgccuuucaagagcuguucauugggcuguuugaaacacaggagaaagaauuuguuaccaaggugaugaauuucuucgaggaggucuucaucuacauuggaaacaucgaacaucuugugauugcuuccuuuugccucaaacacugccagcaccugacaacccugagaauguguguugagaauaucuucccggaugacagcggcugcaucucugauuauaacgaaaagcucguguacuggcgcgagcuguguuccauguuuauuacgaauaaaaacuuccagauccuugacauggaaaauacaagccuggaugaccccucucucgccauucugugcaaggcgcuggcucaaccugucuguaaacuucggaagcucaucuuuaccuccguguauuucgggcaugacagcgagcuguuuaaggccguccugcacaacccccaucucaaacugcuuucccuguacggaaccucucucagccaguccgauauuagacaccugugcgagacacugaagcauccuauguguaaaaucgaggagcuuauucugggcaagugcgacaucucuagcgaagugugugaggauaucgccuccguucucgcuugcaauagcaagcugaaacaccucucucugguggagaacccccuucgcgacgaaggcaugacccugcucugugaggcccugaagcacucccauugcgcucuggaacggcuuaugcugauguacugcugucucacaagcgucucuugcgauuccauuagcgaggugcugcucuguucuaaaagccugucccuucuggaccucgggagcaaugcccuggaagauaacggaguugcgucucugugcgccgcucuuaagcacccgggcuguuccaucagagagcuguggcucauggggugcuuccugacgagcgacuccuguaaagauauugccgcugugcucaucugcaauggaaagcugaagacccuuaaacugggccauaacgagauuggggacacaggcguccgccagcugugugccgcgcuccagcacccucacugcaagcuggaaugucuuggacugcaaaccugccccaucacacgggccugcugugaugacaucgcugccgcucucauugccugcaaaacccugagaucucucaaucuggauuggaucgcccuugacgcugacgcgguggugguucugugugaggcccugagccauccugauugcgcucuccagaugcugggccuucacaaguccggguuugacgaagagacgcagaaaauucugaugucugucgaagagaagaucccccaucucaccauuagccacggaccuuggaucgaugaggaauauaagauccggggcgugcugcucuga

SEQ ID NO: 9116 - protein, 690 aa, Artificial Sequence [sequence omitted]

SEQ ID NO: 9117 - RNA, 2073 nt, Artificial Sequence
  NF-kappaB__Homo_sapiens__ABN11234
auggaaaaaauucuccaaauggcugaagguauugauauuggggagaugccuucauaugaucuggugcuguccaaaccuuccaaaggucaaaaacgccaccucucaacaugugauggucaaaauccuccuaaaaagcaagccgguuccaaauuccaugcgagaccucguuuugagccuguacauuuuguagcuaguaguucaaaagaugaaggacaggaagauccuuauggcccucaaacaaaagagguaaaugaacaaacacauuuugccagcaugccaagagacaucuaccaagauuauacucaagacucuuucaguauacaagaugggaauucucaguauugugauucaucaggauucauucucacaaaagaccagccuguaacagccaacauguauuuugacagugggaacccugccccaagcaccacaucacagcaggcaaacucucagucaacuccugagccuucaccaucacagacauuucccgagucugugguagccgagaagcaguauuuuauugaaaaauuaacggcgacaaucuggaagaaccuuucuaauccagaaaugacuucuggaucugauaaaauuaauuauacauauauguuaacucguuguauucaggcguguaagacaaauccugaguauauauaugcuccuuuaaaggaaauuccuccugccgacauccccaaaaauaaaaaacuucuaacugauggcuaugcuugugaaguuagaugccaaaauaucuacuuaacuacagguuaugcuggcagcaagaauggguccagggaucgagcuacagagcuagcuguaaaacucuugcagaaacguauugaaguuagaguuguccggcggaaauucaagcauacauuuggagaggaccucguggugugucagauuggcauguccuccuaugaauuuccuccagcucugaagccaccagaagaccugguggugcuggguaaagaugcuuccgggcagccaauuuuuaaugcuucugccaaacacuggaccaauuuugucauuacagaaaaugcaaaugaugcaauugguauccuuaacaauucugccucauucaacaagaugucaauugaauacaaauaugagaugaugccaaaucgcacauggcguugucgaguguuuuuacaagaucacugcuuagcugaagguuauggaaccaagaaaacaaguaaacaugcagcugccgacgaggcuuugaaaauucuucaaaaaacacagcccacuuauccaucugucaaaaguucacaaugccauacaggcucuucacccagaggaucuggaaagaagaaagauauaaaggaucuuguaguuuaugagaauucuucaaaucccgugugcacgcugaacgacacagcucaguuuaaccgaaugacaguugaguaugucuaugaaaggaugacaggccuccgcuggaaaugcaaagugauucuagagagugaaguaauugcagaagcaguuggggugaagaaaacugucaaauaugaagcugcuggggaagcugugaaaacccucaaaaagacccagccaacugucauuaacaacuugaagaaaggagcuguugaagaugugauuucaagaaaugaaauucagggccgcucagcagaggaggcuuacaaacagcaaaucaaagaagauaauauuggaaaucagcugcugagaaagauggguuggacugguggugguuuagguaaaucuggugagggcauacgggagccuaucucagugaaagagcagcauaagcgggaagggcuuggucuggauguagagagggugaauaaaauugccaagagagauauugaacagaucaucagaaacuacgcccgcuccgagagccacacagauuugacuuucucuagagagcugacuaaugaugaacggaagcaaauacaucagauugcccagaaguauggucuuaagaguaagucucauggggugggccaugauagguaccuagugguagguagaaaaagacggaaggaagaccuacuagaucagcucaaacaggaaggccaagugggccauuacgagcuuguuaugccucaagcaaauuga

SEQ ID NO: 9118 - RNA, 2073 nt, Artificial Sequence
  derived and/or modified sequence opt1 from NF-kappaB__Homo_sapiens__ABN11234
auggagaagauccugcagauggccgagggcaucgacaucggggagaugcccagcuacgaccucgugcuguccaagccgagcaagggccagaagcgccaccuguccacgugcgacgggcagaacccgcccaagaagcaggccggcagcaaguuccacgcgcggccccgcuucgagcccguccacuucguggccuccagcuccaaggacgaggggcaggaggaccccuacggcccccagaccaaggaggugaacgagcagacccacuucgccagcaugccccgggacaucuaccaggacuacacccaggacuccuucagcauccaggacggcaacucccaguacugcgacagcuccggguucauccucaccaaggaccagccggucaccgccaacauguacuucgacagcggcaaccccgcccccuccacgaccagccagcaggcgaacucccagagcacccccgagccgucccccagccagaccuuccccgagagcgugguggccgagaagcaguacuucaucgagaagcugacggccaccaucuggaagaaccuguccaaccccgagaugaccagcggguccgacaagaucaacuacaccuacaugcucacgcgcugcauccaggccugcaagaccaacccggaguacaucuacgcgccccugaaggagaucccgcccgccgacauccccaagaacaagaagcugcucaccgacggcuacgccugcgagguccggugccagaacaucuaccugaccacgggguacgccggcagcaagaacggcucccgcgaccgggccaccgagcuggcggugaagcuccugcagaagcgcaucgaggugcgggucgugcgccggaaguucaagcacaccuucggggaggaccugguggucugccagaucggcaugagcuccuacgaguucccgcccgcccucaagccgcccgaggaccugguggugcuggggaaggacgccagcggccagcccaucuucaacgccuccgccaagcacuggaccaacuucgucaucacggagaacgcgaacgacgccaucggcauccucaacaacagcgccuccuucaacaagaugagcaucgaguacaaguacgagaugaugcccaaccgcaccuggcggugccgcguguuccugcaggaccacugccuggccgagggguacggcaccaagaagaccuccaagcacgccgcggccgacgaggcccucaagauccugcagaagacgcagcccaccuaccccagcgugaaguccagccagugccacaccggguccagcccccggggcuccgggaagaagaaggacaucaaggaccuggucguguacgagaacagcagcaaccccgugugcacccucaacgacacggcccaguucaaccgcaugaccgucgaguacguguacgagcggaugaccggccugcgcuggaagugcaaggugauccuggaguccgaggucaucgccgaggcggugggcgucaagaagaccgugaaguacgaggccgccggggaggccgugaagacgcucaagaagacccagccgaccgucaucaacaaccugaagaagggcgcgguggaggacgugaucagccggaacgagauccaggggcgcuccgccgaggaggccuacaagcagcagaucaaggaggacaacaucggcaaccagcugcuccggaagaugggguggaccggcggcgggcugggcaagagcggggagggcauccgcgagcccaucuccgucaaggagcagcacaagcgcgaggggcugggccucgacguggagcgggugaacaagaucgccaagcgcgacaucgagcagaucauccggaacuacgcccgcagcgagucccacacggaccugaccuucagccgggagcugaccaacgacgagcgcaagcagauccaccagaucgcgcagaaguacggccucaaguccaagagccacggggucggccacgaccgguaccuggugguggggcgcaagcggcgcaaggaggaccugcucgaccagcugaagcaggagggccaggucggccacuacgagcuggugaugccccaggccaacuga

SEQ ID NO: 9119 - RNA, 2073 nt, Artificial Sequence
  derived and/or modified sequence opt2 from NF-kappaB__Homo_sapiens__ABN11234
auggagaagauccuccagauggccgagggcaucgacaucggcgagaugcccuccuacgaccucguccucuccaagcccuccaagggccagaagcgccaccucuccaccugcgacggccagaacccccccaagaagcaggccggcuccaaguuccacgcccgcccccgcuucgagcccguccacuucgucgccuccuccuccaaggacgagggccaggaggaccccuacggcccccagaccaaggaggucaacgagcagacccacuucgccuccaugccccgcgacaucuaccaggacuacacccaggacuccuucuccauccaggacggcaacucccaguacugcgacuccuccggcuucauccucaccaaggaccagcccgucaccgccaacauguacuucgacuccggcaaccccgcccccuccaccaccucccagcaggccaacucccaguccacccccgagcccucccccucccagaccuuccccgaguccgucgucgccgagaagcaguacuucaucgagaagcucaccgccaccaucuggaagaaccucuccaaccccgagaugaccuccggcuccgacaagaucaacuacaccuacaugcucacccgcugcauccaggccugcaagaccaaccccgaguacaucuacgccccccucaaggagaucccccccgccgacauccccaagaacaagaagcuccucaccgacggcuacgccugcgagguccgcugccagaacaucuaccucaccaccggcuacgccggcuccaagaacggcucccgcgaccgcgccaccgagcucgccgucaagcuccuccagaagcgcaucgagguccgcgucguccgccgcaaguucaagcacaccuucggcgaggaccucgucgucugccagaucggcauguccuccuacgaguucccccccgcccucaagccccccgaggaccucgucguccucggcaaggacgccuccggccagcccaucuucaacgccuccgccaagcacuggaccaacuucgucaucaccgagaacgccaacgacgccaucggcauccucaacaacuccgccuccuucaacaagauguccaucgaguacaaguacgagaugaugcccaaccgcaccuggcgcugccgcgucuuccuccaggaccacugccucgccgagggcuacggcaccaagaagaccuccaagcacgccgccgccgacgaggcccucaagauccuccagaagacccagcccaccuaccccuccgucaaguccucccagugccacaccggcuccuccccccgcggcuccggcaagaagaaggacaucaaggaccucgucgucuacgagaacuccuccaaccccgucugcacccucaacgacaccgcccaguucaaccgcaugaccgucgaguacgucuacgagcgcaugaccggccuccgcuggaagugcaaggucauccucgaguccgaggucaucgccgaggccgucggcgucaagaagaccgucaaguacgaggccgccggcgaggccgucaagacccucaagaagacccagcccaccgucaucaacaaccucaagaagggcgccgucgaggacgucaucucccgcaacgagauccagggccgcuccgccgaggaggccuacaagcagcagaucaaggaggacaacaucggcaaccagcuccuccgcaagaugggcuggaccggcggcggccucggcaaguccggcgagggcauccgcgagcccaucuccgucaaggagcagcacaagcgcgagggccucggccucgacgucgagcgcgucaacaagaucgccaagcgcgacaucgagcagaucauccgcaacuacgcccgcuccgagucccacaccgaccucaccuucucccgcgagcucaccaacgacgagcgcaagcagauccaccagaucgcccagaaguacggccucaaguccaagucccacggcgucggccacgaccgcuaccucgucgucggccgcaagcgccgcaaggaggaccuccucgaccagcucaagcaggagggccaggucggccacuacgagcucgucaugccccaggccaacuga

SEQ ID NO: 9120 - RNA, 2073 nt, Artificial Sequence
  derived and/or modified sequence opt3 from NF-kappaB__Homo_sapiens__ABN11234
auggagaagauccugcagauggccgaaggcauugacauaggggagaugcccagcuacgaucucgugcuuuccaaaccuucuaagggacagaaaagacaccugucaaccugcgacggucaaaacccaccgaagaaacaggcuggcaguaaguuccaugcaaggccccgguuugaaccuguccacuucguugccagcuccucuaaggaugaggggcaggaagacccauauggaccccaaacaaaagaggugaaugagcagacucauuuugcgucgaugccucgcgauaucuaccaggacuauacgcaggauucauucagcauucaagacggcaacagucaguacugugauuccucugguuuuaucuugaccaaggaccagccaguaacagcuaauauguauuucgauagcgggaaccccgccccuuccacuaccucacagcaagcaaauagucagagcacaccagaaccgucucccucccagaccuuuccugagucaguggucgccgaaaaacaauacuucauugagaaguuaacugcuacaaucuggaaaaaccugagcaauccagagaugaccaguggaucugacaagauaaacuauacguacaugcuaacucgaugcauccaggcauguaagaccaaucccgaauacauuuaugccccucucaaagagaucccacccgcugauauuccgaagaacaaaaagcugcuuacagacggcuacgccugcgaagugcguugucagaauaucuaucugacuaccggcuacgcgggguccaaaaacggaagcagagacagggcaacagaguuggccguuaagcuccugcagaaacggauagaagugcgcgucgugagaaggaaguuuaagcacaccuucggugaggaucugguaguuugccaaauuggcaugucgucuuaugaguuuccucccgcucucaaaccaccugaagacuuagugguccuggggaaggaugccuccggacagcccaucuucaaugcaucagcuaaacauuggacgaacuuugugauuacugagaaugccaacgacgcgaucggcauccuuaacaauagugccagcuucaacaagauguccauugaauacaaauaugagaugaugccaaaucggacauggcgcugucgaguguucuugcaggaucacugccuggcagaagguuacgggaccaagaagacuucuaaacacgcugccgcugacgaggcccuaaagauacuccagaaaacacaacccaccuacccuagcgucaagucaagucagugucauacgggauccagcccaagaggcucuggcaaaaagaaggauaucaaagaccugguuguguaugagaacucaaguaauccgguaugcacccuuaacgauacagcacaguuuaauaggaugacuguggaauacgucuaugagcggaugaccgggcugcguuggaaguguaaagugauuuuggaaagcgagguuaucgccgaagcugugggagucaagaaaacagugaaguacgaggcggccggugaggcaguaaagacucucaaaaagacccagcccacaguuauaaacaaucugaaaaagggcgcuguggaagacgucauuucccgcaacgagauccaagggagaucugccgaagaggcauauaaacagcagaucaaggaggauaauauuggaaaccaguuacugaggaaaaugggcuggaccggugggggccucggaaagucgggcgaagggauccgggagccuauuagcgugaaggaacaacacaaacgagagggacuuggucuggacgucgaacgcgugaauaagauagccaaaagagacaucgagcagauuaucaggaacuacgcucgguccgagucacauacugauuugacguucagucgcgaacuaacaaaugacgagagaaagcagauccaccaaauugcccagaaauauggccugaagucuaagagccacgggguuggacaugauagguaccucgugguaggccguaaacggcgaaaggaagaccugcuugaucagcugaaacaggagggucaagucgggcacuacgaauuggugaugccacaggcaaacuga

SEQ ID NO: 9121 - RNA, 2073 nt, Artificial Sequence
  derived and/or modified sequence opt4 from NF-kappaB__Homo_sapiens__ABN11234
auggagaagauccugcagauggccgagggcaucgacaucggcgagaugcccagcuacgaccuggugcugagcaagcccagcaagggccagaagagacaccugagcaccugcgacggccagaacccccccaagaagcaggccggcagcaaguuccacgccagacccagauucgagcccgugcacuucguggccagcagcagcaaggacgagggccaggaggaccccuacggcccccagaccaaggaggugaacgagcagacccacuucgccagcaugcccagagacaucuaccaggacuacacccaggacagcuucagcauccaggacggcaacagccaguacugcgacagcagcggcuucauccugaccaaggaccagcccgugaccgccaacauguacuucgacagcggcaaccccgcccccagcaccaccagccagcaggccaacagccagagcacccccgagcccagccccagccagaccuuccccgagagcgugguggccgagaagcaguacuucaucgagaagcugaccgccaccaucuggaagaaccugagcaaccccgagaugaccagcggcagcgacaagaucaacuacaccuacaugcugaccagaugcauccaggccugcaagaccaaccccgaguacaucuacgccccccugaaggagaucccccccgccgacauccccaagaacaagaagcugcugaccgacggcuacgccugcgaggugagaugccagaacaucuaccugaccaccggcuacgccggcagcaagaacggcagcagagacagagccaccgagcuggccgugaagcugcugcagaagagaaucgaggugagaguggugagaagaaaguucaagcacaccuucggcgaggaccugguggugugccagaucggcaugagcagcuacgaguucccccccgcccugaagccccccgaggaccugguggugcugggcaaggacgccagcggccagcccaucuucaacgccagcgccaagcacuggaccaacuucgugaucaccgagaacgccaacgacgccaucggcauccugaacaacagcgccagcuucaacaagaugagcaucgaguacaaguacgagaugaugcccaacagaaccuggagaugcagaguguuccugcaggaccacugccuggccgagggcuacggcaccaagaagaccagcaagcacgccgccgccgacgaggcccugaagauccugcagaagacccagcccaccuaccccagcgugaagagcagccagugccacaccggcagcagccccagaggcagcggcaagaagaaggacaucaaggaccuggugguguacgagaacagcagcaaccccgugugcacccugaacgacaccgcccaguucaacagaaugaccguggaguacguguacgagagaaugaccggccugagauggaagugcaaggugauccuggagagcgaggugaucgccgaggccgugggcgugaagaagaccgugaaguacgaggccgccggcgaggccgugaagacccugaagaagacccagcccaccgugaucaacaaccugaagaagggcgccguggaggacgugaucagcagaaacgagauccagggcagaagcgccgaggaggccuacaagcagcagaucaaggaggacaacaucggcaaccagcugcugagaaagaugggcuggaccggcggcggccugggcaagagcggcgagggcaucagagagcccaucagcgugaaggagcagcacaagagagagggccugggccuggacguggagagagugaacaagaucgccaagagagacaucgagcagaucaucagaaacuacgccagaagcgagagccacaccgaccugaccuucagcagagagcugaccaacgacgagagaaagcagauccaccagaucgcccagaaguacggccugaagagcaagagccacggcgugggccacgacagauaccugguggugggcagaaagagaagaaaggaggaccugcuggaccagcugaagcaggagggccaggugggccacuacgagcuggugaugccccaggccaacuga

SEQ ID NO: 9122 - RNA, 2073 nt, Artificial Sequence
  derived and/or modified sequence opt5 from NF-kappaB__Homo_sapiens__ABN11234
auggagaagauccugcagauggccgaaggcauugacaucggggagaugcccagcuacgaucucgugcuguccaaaccuucuaagggacagaaaagacaccuuagcacaugcgacggccaaaacccgcccaagaaacaggcuggguccaaguuccaugcccggccucgcuuugaacccguccacuucguugcgucuagcuccaaggaugagggacaggaagacccuuauggcccccaaaccaaagaggugaaugagcagacgcauuuugcuucuaugccuagagauauuuaccaggacuauacccaggauagcuucuccauccaagacgggaacagccaguacugugauucuuccggauuuauucugacaaaggaccagccggugaccgccaauauguauuucgauagcggcaaccccgccccuucuacaaccucccagcaagcuaauagccagucuacacccgaaccuucccccagccagaccuuuccggaguccgucguggccgaaaaacaauacuucaucgagaagcucacggcuaccaucuggaaaaaccugucuaauccugagaugacaagcggcuccgacaagauuaacuauaccuacaugcuuacacggugcauccaggccuguaagaccaaucccgaauacauuuaugcgccucugaaagagaucccucccgccgauauucccaagaacaaaaagcuccugacggacggguacgcuugcgaaguucgcugucagaauaucuaucugacaaccggauacgccggcagcaaaaacgggucuagagaccgggcuacagagcucgccgugaagcugcuucagaaacgcauugaagucagagugguucggcgcaaguuuaagcacaccuucggagaggaucugguggucugccaaaucggcauguccagcuaugaguuuccgcccgcgcucaaaccucccgaagaccugguggugcuugggaaggaugccucuggacagccuaucuucaaugcuagcgccaaacauuggaccaacuuugucauuacagagaaugcuaacgacgccaucggcauucugaacaauuccgccucuuucaacaagaugagcaucgaauacaaauaugagaugaugcccaauagaacguggcggugucgcguuuuccuccaggaucacugccuggcugaaggcuacgggaccaagaagacauccaaacacgcggccgcugacgaggcccugaagauucuccagaaaacccaaccgacauacccuagcgugaagucuucccagugucauaccggaagcucucccagaggcuccgggaaaaagaaggauaucaaagaccugguggucuaugagaacagcuccaauccugugugcacgcuuaacgauacagcccaguuuaaucggaugaccguugaauacguguaugagcgcaugaccggacugagauggaaguguaaagucauccucgaaucugaggugauugcugaagccguuggcgugaagaaaacagucaaguacgaggcggcuggggaggccgugaagacccugaaaaagacacagcccacggucaucaacaaucuuaaaaagggagccguggaagacguuauuagccggaacgagauccaaggcagauccgcugaagaggccuauaaacagcagauuaaggaggauaauaucggcaaccagcugcuccgcaaaaugggguggaccggaggcgggcugggaaagucuggcgaagggauccgggagccuauuagcgugaaggaacaacacaaaagagagggccugggacucgacgucgaacgcgugaauaagaucgcuaaacgggacauugagcagaucauuagaaacuacgcccgcuccgagagccauacagaucugaccuucucucgggaacuuacaaaugacgagagaaagcagauccaccaaauugcgcagaaauauggccugaaguccaagagccacgggguuggacaugaucgcuaccucguggucggccggaaaagacgcaaggaagaccugcuugaucagcugaaacaggaggggcaagugggacacuacgaacucgugaugccccaggccaacuga

SEQ ID NO: 9123 - protein, 690 aa, Artificial Sequence
  NF-kappaB__Homo_sapiens__A3F769
MEKILQMAEGIDIGEMPSYDLVLSKPSKGQKRHLSTCDGQNPPKKQAGSKFHARPRFEPVHFVASSSKDERQEDPYGPQTKEVNEQTHFASMPRDIYQDYTQDSFSIQDGNSQYCDSSGFILTKDQPVTANMYFDSGNPAPSTTSQQANSQSTPEPSPSQTFPESVVAEKQYFIEKLTATIWKNLSNPEMTSGSDKINYTYMLTRCIQACKTNPEYIYAPLKEIPPADIPKNKKLLTDGYACEVRCQNIYLTTGYAGSKNGSRDRATELAVKLLQKRIEVRVVRRKFKHTFGEDLVVCQIGMSSYEFPPALKPPEDLVVLGKDASGQPIFNASAKHWTNFVITENANDAIGILNNSASFNKMSIEYKYEMMPNRTWRCRVFLQDHCLAEGYGTKKTSKHAAADEALKILQKTQPTYPSVKSSQCHTGSSPRGSGKKKDIKDLVVYENSSNPVCTLNDTAQFNRMTVEYVYERMTGLRWKCKVILESEVIAEAVGVKKTVKYEAAGEAVKTLKKTQPTVINNLKKGAVEDVISRNEIQGRSAEEAYKQQIKEDNIGNQLLRKMGWTGGGLGKSGEGIREPISVKEQHKREGLGLDVERVNKIAKRDIEQIIRNYARSESHTDLTFSRELTNDERKQIHQIAQKYGLKSKSHGVGHDRYLVVGRKRRKEDLLDQLKQEGQVGHYELVMPQAN

SEQ ID NO: 9124 - RNA, 2073 nt, Artificial Sequence
  NF-kappaB__Homo_sapiens__ABN11235
auggaaaaaauucuccaaauggcugaagguauugauauuggggagaugccuucauaugaucuggugcuguccaaaccuuccaaaggucaaaaacgccaccucucaacaugugauggucaaaauccuccuaaaaagcaagccgguuccaaauuccaugcgagaccucguuuugagccuguacauuuuguagcuaguaguucaaaagaugaaagacaggaagauccuuauggcccucaaacaaaagagguaaaugaacaaacacauuuugccagcaugccaagagacaucuaccaagauuauacucaagacucuuucaguauacaagaugggaauucucaguauugugauucaucaggauucauucucacaaaagaccagccuguaacagccaacauguauuuugacagugggaacccugccccaagcaccacaucacagcaggcaaacucucagucaacuccugagccuucaccaucacagacauuucccgagucugugguagccgagaagcaguauuuuauugaaaaauuaacggcgacaaucuggaagaaccuuucuaauccagaaaugacuucuggaucugauaaaauuaauuauacauauauguuaacucguuguauucaggcguguaagacaaauccugaguauauauaugcuccuuuaaaggaaauuccuccugccgacauccccaaaaauaaaaaacuucuaacugauggcuaugcuugugaaguuagaugccaaaauaucuacuuaacuacagguuaugcuggcagcaagaauggguccagggaucgagcuacagagcuagcuguaaaacucuugcagaaacguauugaaguuagaguuguccggcggaaauucaagcauacauuuggagaggaccucguggugugucagauuggcauguccuccuaugaauuuccuccagcucugaagccaccagaagaccugguggugcuggguaaagaugcuuccgggcagccaauuuuuaaugcuucugccaaacacuggaccaauuuugucauuacagaaaaugcaaaugaugcaauugguauccuuaacaauucugccucauucaacaagaugucaauugaauacaaauaugagaugaugccaaaucgcacauggcguugucgaguguuuuuacaagaucacugcuuagcugaagguuauggaaccaagaaaacaaguaaacaugcagcugccgacgaggcuuugaaaauucuucaaaaaacacagcccacuuauccaucugucaaaaguucacaaugccauacaggcucuucacccagaggaucuggaaagaagaaagauauaaaggaucuuguaguuuaugagaauucuucaaaucccgugugcacgcugaacgacacagcucaguuuaaccgaaugacaguugaguaugucuaugaaaggaugacaggccuccgcuggaaaugcaaagugauucuagagagugaaguaauugcagaagcaguuggggugaagaaaacugucaaauaugaagcugcuggggaagcugugaaaacccucaaaaagacccagccaacugucauuaacaacuugaagaaaggagcuguugaagaugugauuucaagaaaugaaauucagggccgcucagcagaggaggcuuacaaacagcaaaucaaagaagauaauauuggaaaucagcugcugagaaagauggguuggacugguggugguuuagguaaaucuggugagggcauacgggagccuaucucagugaaagagcagcauaagcgggaagggcuuggucuggauguagagagggugaauaaaauugccaagagagauauugaacagaucaucagaaacuacgcccgcuccgagagccacacagauuugacuuucucuagagagcugacuaaugaugaacggaagcaaauacaucagauugcccagaaguauggucuuaagaguaagucucauggggugggccaugauagguaccuagugguagguagaaaaagacggaaggaagaccuacuagaucagcucaaacaggaaggccaagugggccauuacgagcuuguuaugccucaagcaaauuga

SEQ ID NO: 9125 - RNA, 2073 nt, Artificial Sequence
  derived and/or modified sequence opt1 from NF-kappaB__Homo_sapiens__ABN11235
auggagaagauccugcagauggccgagggcaucgacaucggggagaugcccagcuacgaccucgugcuguccaagccgagcaagggccagaagcgccaccuguccacgugcgacgggcagaacccgcccaagaagcaggccggcagcaaguuccacgcgcggccccgcuucgagcccguccacuucguggccuccagcuccaaggacgagcggcaggaggaccccuacgggccccagaccaaggaggugaacgagcagacccacuucgccagcaugccccgcgacaucuaccaggacuacacccaggacuccuucagcauccaggacggcaacucccaguacugcgacagcuccggcuucauccucaccaaggaccagccggucaccgccaacauguacuucgacagcgggaaccccgcccccuccacgaccagccagcaggcgaacucccagagcacccccgagccgucccccagccagaccuuccccgagagcgugguggccgagaagcaguacuucaucgagaagcugacggccaccaucuggaagaaccuguccaaccccgagaugaccagcggcuccgacaagaucaacuacaccuacaugcucacgcggugcauccaggccugcaagaccaacccggaguacaucuacgcgccccugaaggagaucccgcccgccgacauccccaagaacaagaagcugcucaccgacggguacgccugcgagguccgcugccagaacaucuaccugaccacgggcuacgccgggagcaagaacggcucccgggaccgcgccaccgagcuggcggugaagcuccugcagaagcggaucgaggugcgcgucgugcggcgcaaguucaagcacaccuucggcgaggaccugguggucugccagaucgggaugagcuccuacgaguucccgcccgcccucaagccgcccgaggaccugguggugcugggcaaggacgccagcgggcagcccaucuucaacgccuccgccaagcacuggaccaacuucgucaucacggagaacgcgaacgacgccaucggcauccucaacaacagcgccuccuucaacaagaugagcaucgaguacaaguacgagaugaugcccaaccggaccuggcgcugccggguguuccugcaggaccacugccuggccgagggcuacgggaccaagaagaccuccaagcacgccgcggccgacgaggcccucaagauccugcagaagacgcagcccaccuaccccagcgugaaguccagccagugccacaccggcuccagcccccgcggguccggcaagaagaaggacaucaaggaccuggucguguacgagaacagcagcaaccccgugugcacccucaacgacacggcccaguucaaccggaugaccgucgaguacguguacgagcgcaugaccgggcugcgguggaagugcaaggugauccuggaguccgaggucaucgccgaggcggugggcgucaagaagaccgugaaguacgaggccgccggcgaggccgugaagacgcucaagaagacccagccgaccgucaucaacaaccugaagaagggggcgguggaggacgugaucagccgcaacgagauccagggccgguccgccgaggaggccuacaagcagcagaucaaggaggacaacaucgggaaccagcugcuccgcaagaugggcuggaccgggggcggccugggcaagagcggggaggggauccgcgagcccaucuccgucaaggagcagcacaagcgggagggccuggggcucgacguggagcgcgugaacaagaucgccaagcgggacaucgagcagaucauccgcaacuacgcccggagcgagucccacacggaccugaccuucagccgcgagcugaccaacgacgagcggaagcagauccaccagaucgcgcagaaguacggccucaaguccaagagccacggcgucgggcacgaccgcuaccugguggugggccggaagcgccggaaggaggaccugcucgaccagcugaagcaggaggggcaggucggccacuacgagcuggugaugccccaggccaacuga

SEQ ID NO: 9126 - RNA, 2073 nt, Artificial Sequence
  derived and/or modified sequence opt2 from NF-kappaB__Homo_sapiens__ABN11235
auggagaagauccuccagauggccgagggcaucgacaucggcgagaugcccuccuacgaccucguccucuccaagcccuccaagggccagaagcgccaccucuccaccugcgacggccagaacccccccaagaagcaggccggcuccaaguuccacgcccgcccccgcuucgagcccguccacuucgucgccuccuccuccaaggacgagcgccaggaggaccccuacggcccccagaccaaggaggucaacgagcagacccacuucgccuccaugccccgcgacaucuaccaggacuacacccaggacuccuucuccauccaggacggcaacucccaguacugcgacuccuccggcuucauccucaccaaggaccagcccgucaccgccaacauguacuucgacuccggcaaccccgcccccuccaccaccucccagcaggccaacucccaguccacccccgagcccucccccucccagaccuuccccgaguccgucgucgccgagaagcaguacuucaucgagaagcucaccgccaccaucuggaagaaccucuccaaccccgagaugaccuccggcuccgacaagaucaacuacaccuacaugcucacccgcugcauccaggccugcaagaccaaccccgaguacaucuacgccccccucaaggagaucccccccgccgacauccccaagaacaagaagcuccucaccgacggcuacgccugcgagguccgcugccagaacaucuaccucaccaccggcuacgccggcuccaagaacggcucccgcgaccgcgccaccgagcucgccgucaagcuccuccagaagcgcaucgagguccgcgucguccgccgcaaguucaagcacaccuucggcgaggaccucgucgucugccagaucggcauguccuccuacgaguucccccccgcccucaagccccccgaggaccucgucguccucggcaaggacgccuccggccagcccaucuucaacgccuccgccaagcacuggaccaacuucgucaucaccgagaacgccaacgacgccaucggcauccucaacaacuccgccuccuucaacaagauguccaucgaguacaaguacgagaugaugcccaaccgcaccuggcgcugccgcgucuuccuccaggaccacugccucgccgagggcuacggcaccaagaagaccuccaagcacgccgccgccgacgaggcccucaagauccuccagaagacccagcccaccuaccccuccgucaaguccucccagugccacaccggcuccuccccccgcggcuccggcaagaagaaggacaucaaggaccucgucgucuacgagaacuccuccaaccccgucugcacccucaacgacaccgcccaguucaaccgcaugaccgucgaguacgucuacgagcgcaugaccggccuccgcuggaagugcaaggucauccucgaguccgaggucaucgccgaggccgucggcgucaagaagaccgucaaguacgaggccgccggcgaggccgucaagacccucaagaagacccagcccaccgucaucaacaaccucaagaagggcgccgucgaggacgucaucucccgcaacgagauccagggccgcuccgccgaggaggccuacaagcagcagaucaaggaggacaacaucggcaaccagcuccuccgcaagaugggcuggaccggcggcggccucggcaaguccggcgagggcauccgcgagcccaucuccgucaaggagcagcacaagcgcgagggccucggccucgacgucgagcgcgucaacaagaucgccaagcgcgacaucgagcagaucauccgcaacuacgcccgcuccgagucccacaccgaccucaccuucucccgcgagcucaccaacgacgagcgcaagcagauccaccagaucgcccagaaguacggccucaaguccaagucccacggcgucggccacgaccgcuaccucgucgucggccgcaagcgccgcaaggaggaccuccucgaccagcucaagcaggagggccaggucggccacuacgagcucgucaugccccaggccaacuga

SEQ ID NO: 9127 - RNA, 2073 nt, Artificial Sequence
  derived and/or modified sequence opt3 from NF-kappaB__Homo_sapiens__ABN11235
auggagaagauccugcagauggccgaaggcauugacauaggggagaugcccagcuacgaucucgugcuuuccaaaccuucuaagggacagaaaagacaccugucaaccugcgacggucaaaacccaccgaagaaacaggcuggcaguaaguuccaugcaaggccccgguuugaaccuguccacuucguugccagcuccucuaaggaugagcgccaggaagacccauaugggccccaaacaaaagaggugaaugagcagacucauuuugcgucgaugccucgagauaucuaccaggacuauacgcaggauucauucagcauucaagacggaaacagucaguacugugauuccucuggcuuuaucuugaccaaggaccagccaguaacagcuaauauguauuucgauagcgguaaccccgccccuuccacuaccucacagcaagcaaauagucagagcacaccagaaccgucucccucccagaccuuuccugagucaguggucgccgaaaaacaauacuucauugagaaguuaacugcuacaaucuggaaaaaccugagcaauccagagaugaccagugggucugacaagauaaacuauacguacaugcuaacucguugcauccaggcauguaagaccaaucccgaauacauuuaugccccucucaaagagaucccacccgcugauauuccgaagaacaaaaagcugcuuacagacggauacgccugcgaagugagaugucagaauaucuaucugacuaccggcuacgcgggcuccaaaaacgggagcagggaccgggcaacagaguuggccguuaagcuccugcagaaacgcauagaagugagagucgugaggcggaaguuuaagcacaccuucggagaggaucugguaguuugccaaauugguaugucgucuuaugaguuuccucccgcucucaaaccaccugaagacuuagugguccugggcaaggaugccuccgggcagcccaucuucaaugcaucagcuaaacauuggacgaacuuugugauuacugagaaugccaacgacgcgaucggaauccuuaacaauagugccagcuucaacaagauguccauugaauacaaauaugagaugaugccaaaucgcacauggcgauguagaguguucuugcaggaucacugccuggcagaaggcuacgguaccaagaagacuucuaaacacgcugccgcugacgaggcccuaaagauacuccagaaaacacaacccaccuacccuagcgucaagucaagucagugucauacgggguccagcccaaggggaucuggcaaaaagaaggauaucaaagaccugguuguguaugagaacucaaguaauccgguaugcacccuuaacgauacagcacaguuuaaucggaugacuguggaauacgucuaugagcguaugaccggccugcgcuggaaguguaaagugauuuuggaaagcgagguuaucgccgaagcugugggggucaagaaaacagugaaguacgaggcggcaggagaggccguaaagacucucaaaaagacccagcccacaguuauaaacaaucugaaaaagggugcuguggaagacgucauuuccagaaacgagauccaaggcaggucugccgaagaggcauauaaacagcagaucaaggaggauaauauugggaaccaguuacugcggaaaaugggauggaccggcggugggcucggcaagucgggagaaggcauccgagagccuauuagcgugaaggaacaacacaaacgcgaggggcuuggacuggacgucgaaagagugaauaagauagccaaaagggacaucgagcagauuauccggaacuacgcucgcuccgagucacauacugauuugacguucaguagagaacuaacaaaugacgagaggaagcagauccaccaaauugcccagaaauauggucugaagucuaagagccacggcguugggcaugaucguuaccucgugguaggacggaaacgaagaaaggaagaccugcuugaucagcugaaacaggagggccaagucggucacuacgaauuggugaugccacaggcaaacuga

SEQ ID NO: 9128 - RNA, 2073 nt, Artificial Sequence
  derived and/or modified sequence opt4 from NF-kappaB__Homo_sapiens__ABN11235
auggagaagauccugcagauggccgagggcaucgacaucggcgagaugcccagcuacgaccuggugcugagcaagcccagcaagggccagaagagacaccugagcaccugcgacggccagaacccccccaagaagcaggccggcagcaaguuccacgccagacccagauucgagcccgugcacuucguggccagcagcagcaaggacgagagacaggaggaccccuacggcccccagaccaaggaggugaacgagcagacccacuucgccagcaugcccagagacaucuaccaggacuacacccaggacagcuucagcauccaggacggcaacagccaguacugcgacagcagcggcuucauccugaccaaggaccagcccgugaccgccaacauguacuucgacagcggcaaccccgcccccagcaccaccagccagcaggccaacagccagagcacccccgagcccagccccagccagaccuuccccgagagcgugguggccgagaagcaguacuucaucgagaagcugaccgccaccaucuggaagaaccugagcaaccccgagaugaccagcggcagcgacaagaucaacuacaccuacaugcugaccagaugcauccaggccugcaagaccaaccccgaguacaucuacgccccccugaaggagaucccccccgccgacauccccaagaacaagaagcugcugaccgacggcuacgccugcgaggugagaugccagaacaucuaccugaccaccggcuacgccggcagcaagaacggcagcagagacagagccaccgagcuggccgugaagcugcugcagaagagaaucgaggugagaguggugagaagaaaguucaagcacaccuucggcgaggaccugguggugugccagaucggcaugagcagcuacgaguucccccccgcccugaagccccccgaggaccugguggugcugggcaaggacgccagcggccagcccaucuucaacgccagcgccaagcacuggaccaacuucgugaucaccgagaacgccaacgacgccaucggcauccugaacaacagcgccagcuucaacaagaugagcaucgaguacaaguacgagaugaugcccaacagaaccuggagaugcagaguguuccugcaggaccacugccuggccgagggcuacggcaccaagaagaccagcaagcacgccgccgccgacgaggcccugaagauccugcagaagacccagcccaccuaccccagcgugaagagcagccagugccacaccggcagcagccccagaggcagcggcaagaagaaggacaucaaggaccuggugguguacgagaacagcagcaaccccgugugcacccugaacgacaccgcccaguucaacagaaugaccguggaguacguguacgagagaaugaccggccugagauggaagugcaaggugauccuggagagcgaggugaucgccgaggccgugggcgugaagaagaccgugaaguacgaggccgccggcgaggccgugaagacccugaagaagacccagcccaccgugaucaacaaccugaagaagggcgccguggaggacgugaucagcagaaacgagauccagggcagaagcgccgaggaggccuacaagcagcagaucaaggaggacaacaucggcaaccagcugcugagaaagaugggcuggaccggcggcggccugggcaagagcggcgagggcaucagagagcccaucagcgugaaggagcagcacaagagagagggccugggccuggacguggagagagugaacaagaucgccaagagagacaucgagcagaucaucagaaacuacgccagaagcgagagccacaccgaccugaccuucagcagagagcugaccaacgacgagagaaagcagauccaccagaucgcccagaaguacggccugaagagcaagagccacggcgugggccacgacagauaccugguggugggcagaaagagaagaaaggaggaccugcuggaccagcugaagcaggagggccaggugggccacuacgagcuggugaugccccaggccaacuga

SEQ ID NO: 9129 - RNA, 2073 nt, Artificial Sequence
  derived and/or modified sequence opt5 from NF-kappaB__Homo_sapiens__ABN11235
auggagaagauccugcagauggccgaaggcauugacaucggggagaugcccagcuacgaucucgugcuguccaaaccuucuaagggacagaaaagacaccuuagcacaugcgacggccaaaacccgcccaagaaacaggcuggguccaaguuccaugcccggccucgcuuugaacccguccacuucguugcgucuagcuccaaggaugagagacaggaagacccuuauggaccccaaaccaaagaggugaaugagcagacgcauuuugcuucuaugccucgggauauuuaccaggacuauacccaggauagcuucuccauccaagacggcaacagccaguacugugauucuuccggguuuauucugacaaaggaccagccggugaccgccaauauguauuucgauagcggaaaccccgccccuucuacaaccucccagcaagcuaauagccagucuacacccgaaccuucccccagccagaccuuuccggaguccgucguggccgaaaaacaauacuucaucgagaagcucacggcuaccaucuggaaaaaccugucuaauccugagaugacaagcggcuccgacaagauuaacuauaccuacaugcuuacacgcugcauccaggccuguaagaccaaucccgaauacauuuaugcgccucugaaagagaucccucccgccgauauucccaagaacaaaaagcuccugacggacggcuacgcuugcgaaguuagaugucagaauaucuaucugacaaccggguacgccggaagcaaaaacggcucucgggaccgcgcuacagagcucgccgugaagcugcuucagaaaagaauugaaguccgggugguucgcagaaaguuuaagcacaccuucggggaggaucugguggucugccaaaucggaauguccagcuaugaguuuccgcccgcgcucaaaccucccgaagaccugguggugcuuggcaaggaugccucugggcagccuaucuucaaugcuagcgccaaacauuggaccaacuuugucauuacagagaaugcuaacgacgccaucggcauucugaacaauuccgccucuuucaacaagaugagcaucgaauacaaauaugagaugaugcccaaucggacguggcgcuguagaguuuuccuccaggaucacugccuggcugaaggauacggcaccaagaagacauccaaacacgcggccgcugacgaggcccugaagauucuccagaaaacccaaccgacauacccuagcgugaagucuucccagugucauaccgggagcucuccccggggauccggcaaaaagaaggauaucaaagaccugguggucuaugagaacagcuccaauccugugugcacgcuuaacgauacagcccaguuuaaucgcaugaccguugaauacguguaugagagaaugaccgggcugcgguggaaguguaaagucauccucgaaucugaggugauugcugaagccguuggagugaagaaaacagucaaguacgaggcggcuggcgaggccgugaagacccugaaaaagacacagcccacggucaucaacaaucuuaaaaagggggccguggaagacguuauuagcagaaacgagauccaaggacgcuccgcugaagaggccuauaaacagcagauuaaggaggauaauaucggcaaccagcugcuccggaaaaugggcuggaccgggggaggccuggggaagucuggagaaggcaucagagagccuauuagcgugaaggaacaacacaaacgcgaggggcugggccucgacgucgaacgggugaauaagaucgcuaaaagagacauugagcagaucauucgcaacuacgcccgguccgagagccauacagaucugaccuucucuagagaacuuacaaaugacgagcgcaagcagauccaccaaauugcgcagaaauauggacugaaguccaagagccacggcguugggcaugaucgguaccucguggucggaagaaaacgccggaaggaagaccugcuugaucagcugaaacaggagggccaaguggggcacuacgaacucgugaugccccaggccaacuga

SEQ ID NO: 9130 - protein, 975 aa, Artificial Sequence
  NLRP14__Homo_sapiens__Q86UT6
MRWGHHLPRASWGSGFRRALQRPDDRIPFLIHWSWPLQGERPFGPPRAFIRHHGSSVDSAPPPGRHGRLFPSASATEAIQRHRRNLAEWFSRLPREERQFGPTFALDTVHVDPVIRESTPDELLRPPAELALEHQPPQAGLPPLALSQLFNPDACGRRVQTVVLYGTVGTGKSTLVRKMVLDWCYGRLPAFELLIPFSCEDLSSLGPAPASLCQLVAQRYTPLKEVLPLMAAAGSHLLFVLHGLEHLNLDFRLAGTGLCSDPEEPQEPAAIIVNLLRKYMLPQASILVTTRPSAIGRIPSKYVGRYGEICGFSDTNLQKLYFQLRLNQPYCGYAVGGSGVSATPAQRDHLVQMLSRNLEGHHQIAAACFLPSYCWLVCATLHFLHAPTPAGQTLTSIYTSFLRLNFSGETLDSTDPSNLSLMAYAARTMGKLAYEGVSSRKTYFSEEDVCGCLEAGIRTEEEFQLLHIFRRDALRFFLAPCVEPGRAGTFVFTVPAMQEYLAALYIVLGLRKTTLQKVGKEVAELVGRVGEDVSLVLGIMAKLLPLRALPLLFNLIKVVPRVFGRMVGKSREAVAQAMVLEMFREEDYYNDDVLDQMGASILGVEGPRRHPDEPPEDEVFELFPMFMGGLLSAHNRAVLAQLGCPIKNLDALENAQAIKKKLGKLGRQVLPPSELLDHLFFHYEFQNQRFSAEVLSSLRQLNLAGVRMTPVKCTVVAAVLGSGRHALDEVNLASCQLDPAGLRTLLPVFLRARKLGLQLNSLGPEACKDLRDLLLHDQCQITTLRLSNNPLTAAGVAVLMEGLAGNTSVTHLSLLHTGLGDEGLELLAAQLDRNRQLQELNVAYNGAGDTAALALARAAREHPSLELLHLYFNELSSEGRQVLRDLGGAAEGGARVVVSLTEGTAVSEYWSVILSEVQRNLNSWDRARVQRHLELLLRDLEDSRGATLNPWRKAQLLRVEGEVRALLEQLGSSGS

SEQ ID NO: 9131 - RNA, 2928 nt, Artificial Sequence
  NLRP14__Homo_sapiens__AAI10891
augagguggggccaccauuugcccagggccucuuggggcucugguuuuagaagagcacuccagcgaccagaugaucguauccccuuccugauccacuggaguuggccccuucaaggggagcgucccuuugggcccccuagggccuuuauacgccaccacggaagcucgguagauagcgcucccccacccgggaggcauggacggcuguuccccagcgccucugcaacugaagcuauacagcggcaccgccggaaccuggcugagugguucagccggcugcccagggaggagcgccaguuuggcccaaccuuugcccuagacacgguccacguugacccugugauccgcgagaguaccccugaugagcuacuucgcccacccgcggagcuggcccuggagcaucagccaccccaggccgggcuccccccacuggccuugucucagcucuuuaacccggaugccugugggcgccgggugcagacaguggugcuguaugggacagugggcacaggcaagagcacgcuggugcgcaagaugguucuggacugguguuaugggcggcugccggccuucgagcugcucauccccuucuccugugaggaccugucaucccugggcccugccccagccucccugugccaacuuguggcccagcgcuacacgccccugaaggagguucugccccugauggcugcugcugggucccaccuccucuuugugcuccauggcuuagagcaucucaaccucgacuuccggcuggcaggcacgggacuuuguagugacccggaggaaccgcaggaaccagcugcuaucaucgucaaccugcugcgcaaauacaugcugccucaggccagcauucuggugaccacucggcccucugccauuggccguauccccagcaaguacgugggccgcuauggugagaucugcgguuucucugauaccaaccugcagaagcucuacuuccagcuccgccucaaccagccguacugcggguaugccguuggcgguucaggugucucugccacaccagcucagcgugaccaccuggugcagaugcucucccggaaccuggaggggcaccaccagauagccgcugccugcuuccugccguccuauugcuggcucguuugugccaccuugcacuuccugcaugcccccacgccugcugggcagacccuuacaagcaucuauaccagcuuccugcgccucaacuucagcggggaaacccuggacagcacugaccccuccaauuugucccugauggccuaugcagcccgaaccaugggcaaguuggccuaugaggggguguccucccgcaagaccuacuucucugaagaggaugucuguggcugccuggaggcuggcaucaggacggaggaggaguuucagcugcugcacaucuuccgucgggaugcccugagguuuuuccuggccccauguguggagccagggcgugcaggcaccuucguguucaccgugcccgccaugcaggaauaccuggcugcccucuacauugugcuggguuugcgcaagacgacccugcaaaaggugggcaaggaaguggcugagcucgugggccguguuggggaggacgucagccugguacugggcaucauggccaagcugcugccucugcgggcucugccucugcucuucaaccugaucaaggugguuccacgaguguuugggcgcaugguggguaaaagccgggaggcgguggcucaggccauggugcuggagauguuucgagaggaggacuacuacaacgaugauguucuggaccagaugggcgccaguauccugggcguggagggcccccggcgccacccagaugagcccccugaggaugaagucuucgagcucuuccccauguucaugggggggcuucucucugcccacaaccgagcugugcuagcucagcuuggcugccccaucaagaaccuggaugcccuggagaaugcccaggccaucaagaagaagcugggcaagcugggccggcaggugcugcccccaucagagcuccuugaccaccucuucuuccacuaugaguuccagaaccagcgcuucuccgcugaggugcucagcucccugcgucagcucaaccuggcaggugugcgcaugacaccagucaagugcacagugguggcagcugugcugggcagcggaaggcaugcccuggaugaggugaacuuggccuccugccagcuagauccugcugggcugcgcacacuccugccugucuuccugcgugcccggaagcugggcuugcaacucaacagccugggcccugaggccugcaaggaccuccgagaccuguugcugcaugaccagugccaaauuaccacacugcggcuguccaacaacccgcugacggcggcagguguugccgugcuaauggaggggcuggcaggaaacaccucagugacgcaccugucccugcugcacacgggccuuggggacgaaggccuggagcugcuggcugcccagcuggaccgcaaccggcagcugcaggagcugaacguggcguacaacggugcuggugacacagcggcccuggcccuggccagagcugcccgggagcacccuucccuggaacugcuacaccucuacuucaaugagcugagcucagagggccgccaggucuugcgagacuuggggggugcugcugaagguggugcccgggugguggugucacugacagaggggacggcggugucagaauacuggucagugauccucagugaaguccagcggaaccucaauagcugggaucgggcccggguucagcgacaccuugagcuccuacugcgggaucuggaagauagccggggugccacccuuaauccuuggcgcaaggcccagcugcugcgaguggagggcgaggucagggcccuccuggagcagcugggaagcucuggaagcuga

SEQ ID NO: 9132 - RNA, 2928 nt, Artificial Sequence
  derived and/or modified sequence opt1 from NLRP14__Homo_sapiens__AAI10891
augcgcuggggccaccaccucccccgggccagcuggggguccggcuuccgccgggcccugcagcgcccggacgaccggauccccuuccugauccacuggagcuggccccugcagggggagcgccccuucggcccgccccgggcguucauccgccaccacggguccagcguggacuccgccccgccgcccggccggcacggccgccucuuccccagcgccuccgccaccgaggccauccagcggcaccgccggaaccuggcggagugguucagccgccugccccgggaggagcgccaguucgggcccaccuucgcccucgacacgguccacguggaccccgugauccgggaguccacccccgacgagcugcugcgcccgcccgccgagcucgcccuggagcaccagccgccccaggcgggccugccgccccucgcccugagccagcuguucaaccccgacgccugcgggcggcgcguccagaccguggugcucuacggcaccgucgggacgggcaaguccacccuggugcggaagauggugcuggacuggugcuacggccgccuccccgccuucgagcugcugauccccuucagcugcgaggaccucuccagccuggggcccgccccggcgucccugugccagcucgucgcccagcgcuacacgccccugaaggaggugcugccccucauggccgccgccggcagccaccuccuguucgugcugcacgggcuggagcaccugaaccucgacuuccggcuggcgggcaccggccugugcuccgaccccgaggagccgcaggagcccgccgccaucaucgucaaccuccugcgcaaguacaugcugccccaggccagcauccucgugaccacccggccguccgccaucgggcgcauccccagcaaguacgugggccgguacggggagaucugcggcuucagcgacaccaaccugcagaagcuguacuuccagcuccgccugaaccagcccuacugcggguacgcggucggcggcuccggggugagcgccacccccgcccagcgggaccaccuggugcagaugcucucccgcaaccuggagggccaccaccagaucgccgccgcgugcuuccugcccagcuacugcuggcucgucugcgccacgcugcacuuccugcacgcccccacccccgccgggcagacccugaccuccaucuacacgagcuuccuccggcugaacuucuccggcgagacccuggacagcaccgaccccuccaaccucagccugauggcguacgccgcccgcaccauggggaagcuggccuacgagggcguguccagccggaagacguacuucuccgaggaggacgugugcggcugccucgaggccgggauccgcaccgaggaggaguuccagcugcugcacaucuuccggcgcgacgcgcuccgguucuuccuggccccgugcgucgagcccggccgcgccgggaccuucguguucaccgugcccgccaugcaggaguaccuggccgcgcucuacaucguccugggccugcggaagacgacccuccagaagguggggaaggaggucgccgagcuggugggccgcgugggcgaggacgucagccuggugcucgggaucauggccaagcugcugccccuccgggcccugccgcuccuguucaaccugaucaagguggucccccgcguguucggccgcaugguggggaagucccgggaggccgucgcgcaggccauggugcuggagauguuccgcgaggaggacuacuacaacgacgacgugcucgaccagaugggcgccagcauccugggcgucgaggggccccggcgccaccccgacgagccgcccgaggacgagguguucgagcuguuccccauguucaugggcgggcuccuguccgcccacaaccgggcggugcuggcccagcucggcugccccaucaagaaccuggacgcccuggagaacgcccaggccaucaagaagaagcucgggaagcugggccgccagguccugccgcccagcgagcuccuggaccaccuguucuuccacuacgaguuccagaaccagcgguucuccgcggaggugcucagcagccugcgccagcugaaccucgccggcgugcggaugacccccgucaagugcaccgugguggccgccguccugggguccggccgccacgcccuggacgaggugaaccucgcgagcugccagcuggaccccgccgggcugcggacgcuccugccgguguuccugcgcgcccggaagcucggccugcagcugaacucccucgggcccgaggccugcaaggaccugcgcgaccugcuccugcacgaccagugccagaucaccacccugcggcucagcaacaacccccugaccgccgcgggcgucgccgugcugauggagggccucgccgggaacacguccgugacccaccugagccugcuccacaccggccugggggacgagggccuggagcuccuggccgcgcagcuggaccgcaaccggcagcuccaggagcugaacgucgccuacaacggggccggcgacaccgccgcccuggcgcucgcccgcgccgcccgggagcacccgucccuggagcugcuccaccuguacuucaacgagcugagcuccgagggccgccaggugcuccgggaccucgggggcgccgcggagggcggggcccgcguggucgugagccugacggaggggaccgccguguccgaguacuggagcgucauccuguccgaggugcagcgcaaccugaacagcugggaccgggcccgcgugcagcggcaccuggagcuccugcugcgcgaccucgaggacucccggggcgccacccugaaccccuggcgcaaggcgcagcugcugcgggucgagggcgaggugcgcgcccuccuggagcagcuggggagcuccggcagcuga

SEQ ID NO: 9133 - RNA, 2928 nt, Artificial Sequence
  derived and/or modified sequence opt2 from NLRP14__Homo_sapiens__AAI10891
augcgcuggggccaccaccucccccgcgccuccuggggcuccggcuuccgccgcgcccuccagcgccccgacgaccgcauccccuuccucauccacugguccuggccccuccagggcgagcgccccuucggccccccccgcgccuucauccgccaccacggcuccuccgucgacuccgcccccccccccggccgccacggccgccucuuccccuccgccuccgccaccgaggccauccagcgccaccgccgcaaccucgccgagugguucucccgccucccccgcgaggagcgccaguucggccccaccuucgcccucgacaccguccacgucgaccccgucauccgcgaguccacccccgacgagcuccuccgcccccccgccgagcucgcccucgagcaccagcccccccaggccggccuccccccccucgcccucucccagcucuucaaccccgacgccugcggccgccgcguccagaccgucguccucuacggcaccgucggcaccggcaaguccacccucguccgcaagaugguccucgacuggugcuacggccgccuccccgccuucgagcuccucauccccuucuccugcgaggaccucuccucccucggccccgcccccgccucccucugccagcucgucgcccagcgcuacaccccccucaaggagguccucccccucauggccgccgccggcucccaccuccucuucguccuccacggccucgagcaccucaaccucgacuuccgccucgccggcaccggccucugcuccgaccccgaggagccccaggagcccgccgccaucaucgucaaccuccuccgcaaguacaugcucccccaggccuccauccucgucaccacccgccccuccgccaucggccgcauccccuccaaguacgucggccgcuacggcgagaucugcggcuucuccgacaccaaccuccagaagcucuacuuccagcuccgccucaaccagcccuacugcggcuacgccgucggcggcuccggcgucuccgccacccccgcccagcgcgaccaccucguccagaugcucucccgcaaccucgagggccaccaccagaucgccgccgccugcuuccuccccuccuacugcuggcucgucugcgccacccuccacuuccuccacgcccccacccccgccggccagacccucaccuccaucuacaccuccuuccuccgccucaacuucuccggcgagacccucgacuccaccgaccccuccaaccucucccucauggccuacgccgcccgcaccaugggcaagcucgccuacgagggcgucuccucccgcaagaccuacuucuccgaggaggacgucugcggcugccucgaggccggcauccgcaccgaggaggaguuccagcuccuccacaucuuccgccgcgacgcccuccgcuucuuccucgcccccugcgucgagcccggccgcgccggcaccuucgucuucaccguccccgccaugcaggaguaccucgccgcccucuacaucguccucggccuccgcaagaccacccuccagaaggucggcaaggaggucgccgagcucgucggccgcgucggcgaggacgucucccucguccucggcaucauggccaagcuccucccccuccgcgcccucccccuccucuucaaccucaucaaggucgucccccgcgucuucggccgcauggucggcaagucccgcgaggccgucgcccaggccaugguccucgagauguuccgcgaggaggacuacuacaacgacgacguccucgaccagaugggcgccuccauccucggcgucgagggcccccgccgccaccccgacgagccccccgaggacgaggucuucgagcucuuccccauguucaugggcggccuccucuccgcccacaaccgcgccguccucgcccagcucggcugccccaucaagaaccucgacgcccucgagaacgcccaggccaucaagaagaagcucggcaagcucggccgccagguccucccccccuccgagcuccucgaccaccucuucuuccacuacgaguuccagaaccagcgcuucuccgccgagguccucuccucccuccgccagcucaaccucgccggcguccgcaugacccccgucaagugcaccgucgucgccgccguccucggcuccggccgccacgcccucgacgaggucaaccucgccuccugccagcucgaccccgccggccuccgcacccuccuccccgucuuccuccgcgcccgcaagcucggccuccagcucaacucccucggccccgaggccugcaaggaccuccgcgaccuccuccuccacgaccagugccagaucaccacccuccgccucuccaacaacccccucaccgccgccggcgucgccguccucauggagggccucgccggcaacaccuccgucacccaccucucccuccuccacaccggccucggcgacgagggccucgagcuccucgccgcccagcucgaccgcaaccgccagcuccaggagcucaacgucgccuacaacggcgccggcgacaccgccgcccucgcccucgcccgcgccgcccgcgagcaccccucccucgagcuccuccaccucuacuucaacgagcucuccuccgagggccgccagguccuccgcgaccucggcggcgccgccgagggcggcgcccgcgucgucgucucccucaccgagggcaccgccgucuccgaguacugguccgucauccucuccgagguccagcgcaaccucaacuccugggaccgcgcccgcguccagcgccaccucgagcuccuccuccgcgaccucgaggacucccgcggcgccacccucaaccccuggcgcaaggcccagcuccuccgcgucgagggcgagguccgcgcccuccucgagcagcucggcuccuccggcuccuga

SEQ ID NO: 9134 - RNA, 2928 nt, Artificial Sequence
  derived and/or modified sequence opt3 from NLRP14__Homo_sapiens__AAI10891
augagauggggccaccaucugcccagggccagcuggggguccggauuccggcgcgcucuccagcgaccugacgaucguaucccauuucuuauucacuggucuuggccgcugcaaggugagagacccuucggcccuccaagggcauuuauacggcaucacgggucaaguguggacagcgcacccccuccaggacgccauggcagauuguuccccuccgcgucugcuaccgaagccauccagaggcaccggcgcaacuuagcagagugguuuucgcgacugccuagagaagagaggcaguucgguccaacauuugcccuagauacuguccacguugacccggugauucgggaaucaacgcccgaugagcuccugcguccuccagcugagcuugcacuggaacaucagcccccucaagccggguugccaccccucgcucugagccagcuguucaauccggacgccugcggacgcagaguacagaccgugguccucuacggcacagugggcacugggaagaguaccuuaguuaggaaaauggugcuggauugguguuauggacggcuuccugcguuugaguugcugauccccuucuccugcgaagaccuaucuagccucgguccagccccugccucccugugucagcuugucgcucaacgauacacaccccugaaggagguguugccacucauggccgcagcuggcucacaccuguuauuuguacugcaugggcucgagcaccuuaaccuggauuuccgcuuggccggaaccggccuaugcagugaccccgaggaaccucaggaaccagcggccauuaucguuaaucugcucagaaaauauaugcugccgcaggcaagcauacuugugacuacaaggcccucugcuaucggucggauuccuuccaaguacgucgggcgcuauggagagaucuguggcuuuucagauaccaaccugcagaaauuguacuuccaacucagacugaaucagccauauugcggcuacgccgucgggggaagcggugugagugcuacgcccgcccagagggaccacuuagugcaaaugcugucucguaaccuagaaggccaucaccagauugcagccgcuuguuuccucccuuccuacugcuggcugguuugugcgacucuucacuuuuugcaugcaccaacccccgccgggcagacacugacuagcaucuauaccucguuccuccggcugaauuuuucuggagagacacuugauuccaccgacccgucaaaccugaguuugauggcuuacgccgcacgaacgaugggcaagcucgccuaugagggugugagcuccagaaagacuuacuucucugaagaggacguaugcgggugucuggaagcuggcauaaggacagaggaagaguuucaguuacugcauauuuuccgccgggaugcccuaagauuuuuccucgcaccuugcguggagccaggaagggcgggcaccuuugucuucacugugcccgcuaugcaagaauaucuggccgcacuuuacaucguuuuggggcugcgcaaaacaacccuccagaaggugggaaaagaggucgccgaacuggugggucgaguaggcgaggacguuagcuuagugcuggggauuauggcuaaacuuuugccucuccgggcccugccccuacuguuuaaucucaucaaagucgugccacgugucuucggaagaauggugggcaagucaagggaagcaguugcucaggccauggugcuggagauguuucgcgaggaagauuauuacaacgacgauguacuugaccagaugggugcgaguaucuugggggucgagggcccucggagacaccccgaugaaccaccggaggacgagguguucgaacuguucccuauguuuaugggaggcuuacucuccgcccacaauagggcuguucuggcacaacuugggugccccauuaagaaccuggaugccuuggagaaugcucaggccauaaagaagaaacucggaaagcugggucgacaggugcuaccacccagcgaacugcucgaccaucuguucuuucacuacgaguuccagaaccaacgcuuuucugcagaaguccuuucaaguuugcggcagcugaauuuagcgggcgugagaaugacgccuguaaaauguaccgugguugccgcuguccucgggagcggaaggcaugcccuggaugaggugaaccuugcauccugccagcuggacccagcuggccuacguacacuccugcccguguucuugcgcgcccggaagcuggguuuacagcucaacucucuggggccugaggcauguaaagaccuuagagaucuguugcuccacgaccaaugccagaucacuacccugaggcuaucgaauaacccgcugacagccgcuggcgucgcgguucuuauggaaggacucgccggcaauacuagcgugacccaccuguccuugcugcauacaggguuaggagaugagggccucgaacugcuugcagcucagcuggaccgaaaccggcaauugcaggagcucaauguggccuauaacggugccggggauaccgcugcacuggcccuagcgcgcgcugccagagaacacccaucacuggagcuucuccaucuguacuuuaaugaguugaguucugaaggaaggcagguauuacgggaccugggcggugcagccgagggcggggcucgagucgugguuagccucacugaaggaacggcaguguccgaguauuggucagucauucugagcgaagugcagagaaaccuuaauucuugggaucgcgccaggguucaacgucaccuggaguugcuacugcgggaccucgaggauuccagaggcgcgacacugaaccccuggaggaaggcucagcuuuuacgcguggaaggggagguacgagcccugcucgaacaguugggaaguagcggcucuuga

SEQ ID NO: 9135 - RNA, 2928 nt, Artificial Sequence
  derived and/or modified sequence opt4 from NLRP14__Homo_sapiens__AAI10891
augagauggggccaccaccugcccagagccagcuggggcagcggcuucagaagagcccugcagagacccgacgacagaauccccuuccugauccacuggagcuggccccugcagggcgagagacccuucggcccccccagagccuucaucagacaccacggcagcagcguggacagcgcccccccccccggcagacacggcagacuguuccccagcgccagcgccaccgaggccauccagagacacagaagaaaccuggccgagugguucagcagacugcccagagaggagagacaguucggccccaccuucgcccuggacaccgugcacguggaccccgugaucagagagagcacccccgacgagcugcugagaccccccgccgagcuggcccuggagcaccagcccccccaggccggccugcccccccuggcccugagccagcuguucaaccccgacgccugcggcagaagagugcagaccguggugcuguacggcaccgugggcaccggcaagagcacccuggugagaaagauggugcuggacuggugcuacggcagacugcccgccuucgagcugcugauccccuucagcugcgaggaccugagcagccugggccccgcccccgccagccugugccagcugguggcccagagauacaccccccugaaggaggugcugccccugauggccgccgccggcagccaccugcuguucgugcugcacggccuggagcaccugaaccuggacuucagacuggccggcaccggccugugcagcgaccccgaggagccccaggagcccgccgccaucaucgugaaccugcugagaaaguacaugcugccccaggccagcauccuggugaccaccagacccagcgccaucggcagaauccccagcaaguacgugggcagauacggcgagaucugcggcuucagcgacaccaaccugcagaagcuguacuuccagcugagacugaaccagcccuacugcggcuacgccgugggcggcagcggcgugagcgccacccccgcccagagagaccaccuggugcagaugcugagcagaaaccuggagggccaccaccagaucgccgccgccugcuuccugcccagcuacugcuggcuggugugcgccacccugcacuuccugcacgcccccacccccgccggccagacccugaccagcaucuacaccagcuuccugagacugaacuucagcggcgagacccuggacagcaccgaccccagcaaccugagccugauggccuacgccgccagaaccaugggcaagcuggccuacgagggcgugagcagcagaaagaccuacuucagcgaggaggacgugugcggcugccuggaggccggcaucagaaccgaggaggaguuccagcugcugcacaucuucagaagagacgcccugagauucuuccuggcccccugcguggagcccggcagagccggcaccuucguguucaccgugcccgccaugcaggaguaccuggccgcccuguacaucgugcugggccugagaaagaccacccugcagaaggugggcaaggagguggccgagcuggugggcagagugggcgaggacgugagccuggugcugggcaucauggccaagcugcugccccugagagcccugccccugcuguucaaccugaucaagguggugcccagaguguucggcagaauggugggcaagagcagagaggccguggcccaggccauggugcuggagauguucagagaggaggacuacuacaacgacgacgugcuggaccagaugggcgccagcauccugggcguggagggccccagaagacaccccgacgagccccccgaggacgagguguucgagcuguuccccauguucaugggcggccugcugagcgcccacaacagagccgugcuggcccagcugggcugccccaucaagaaccuggacgcccuggagaacgcccaggccaucaagaagaagcugggcaagcugggcagacaggugcugccccccagcgagcugcuggaccaccuguucuuccacuacgaguuccagaaccagagauucagcgccgaggugcugagcagccugagacagcugaaccuggccggcgugagaaugacccccgugaagugcaccgugguggccgccgugcugggcagcggcagacacgcccuggacgaggugaaccuggccagcugccagcuggaccccgccggccugagaacccugcugcccguguuccugagagccagaaagcugggccugcagcugaacagccugggccccgaggccugcaaggaccugagagaccugcugcugcacgaccagugccagaucaccacccugagacugagcaacaacccccugaccgccgccggcguggccgugcugauggagggccuggccggcaacaccagcgugacccaccugagccugcugcacaccggccugggcgacgagggccuggagcugcuggccgcccagcuggacagaaacagacagcugcaggagcugaacguggccuacaacggcgccggcgacaccgccgcccuggcccuggccagagccgccagagagcaccccagccuggagcugcugcaccuguacuucaacgagcugagcagcgagggcagacaggugcugagagaccugggcggcgccgccgagggcggcgccagagugguggugagccugaccgagggcaccgccgugagcgaguacuggagcgugauccugagcgaggugcagagaaaccugaacagcugggacagagccagagugcagagacaccuggagcugcugcugagagaccuggaggacagcagaggcgccacccugaaccccuggagaaaggcccagcugcugagaguggagggcgaggugagagcccugcuggagcagcugggcagcagcggcagcuga

SEQ ID NO: 9136 - RNA, 2928 nt, Artificial Sequence
  derived and/or modified sequence opt5 from NLRP14__Homo_sapiens__AAI10891
augagauggggccaccaucugccccgggccagcuggggguccggauuccgcagagcucuccagcggccugacgaucgcaucccguuucugauucacuggucuuggccccuucaaggcgagagaccuuucgggcccccucgggccuuuauccgccaucacggaagcuccguggacucugcgcccccuccgggcagacaugggcggcuguuccccagcgcuuccgccaccgaagccauucagcgccacagacggaaccucgcugagugguuuucucgccugccuagagaagaacggcaguucggacccacauuugcccuugauacgguccacguugacccugugauccgcgaaagcacccccgaugagcugcucagaccgccugcugagcuggcccuggaacaucagcccccucaagcgggccucccuccccuggcccuuucccagcuguucaaucccgacgcuugcggccggagagugcagacagucgugcucuacgggaccguuggaacaggcaagagcacccuggugcgcaaaaugguccuugauugguguuaugggcggcugccggccuuugagcuccugauucccuucucuugcgaagaccuguccagccucggaccugcucccgccucucugugucagcuuguggcgcaaagauacacaccucugaaggagguucucccccugauggccgcugccggcucccaccuucuguuugugcuccaugggcuggagcaccugaaccucgauuuccgccuggcuggaaccggccuuugcagcgacccggaggagccucaggaacccgccgccaucaucgucaaucugcuccggaaauauaugcugccucaggcuucuauucuugugacgaccagacccuccgcgaucggccgcauuccuagcaaguacguggggcgguauggagagaucuguggcuuuuccgauacaaaccugcagaaacucuacuuccaacugagacugaaucagcccuauugcggguacgccgucggaggcucugggguuagcgcuaccccggcccagcgcgaccaccucgugcaaaugcugucccggaaccuugaaggacaucaccagauugccgcugccuguuuccugccuagcuacugcuggcucgugugugcgacacugcauuuucugcacgcucccacccccgccggccagacgcuuacaucuaucuauaccuccuuccucagacugaauuuuagcggcgagacacuggauucuaccgacccuagcaaccucucccugauggccuacgcugcccgcaccauggggaagcuggcuuaugagggagucucuagccggaagacauacuucuccgaagaggacgugugcggcugucuggaagccgggauuagaacggaggaagaguuucagcuccugcauaucuuccggcgcgaugcgcugagauuuuuccuugccccgugcguugagcccggacgggcuggcaccuuuguguucacagucccugccaugcaagaauaucucgcugcccuguacaucgugcuggggcucagaaaaaccacacugcagaagguuggcaaagagguggcggaacuugucggacgcgugggcgaggacgucagccuggugcucgggauuauggccaagcugcugccccuucgggcucucccucugcuguuuaaucucaucaaaguugugcccagagucuucggacgcauggugggcaagucuagagaagccguugcucaggccauggugcuggagauguuucgggaggaagauuauuacaacgacgauguccuugaccagaugggggccuccauucugggaguggagggcccucgcagacaccccgaugaaccgccugaggacgagguguucgaacucuuccccauguuuaugggcgggcugcugagcgcucacaaucgggcgguucuugcccaacucggaugcccuaucaagaaccuggaugcucuggagaaugcccaggccauuaaaaagaaacucggcaagcuggggcgccagguccuucccccgucugaacugcucgaccaucuguucuuucacuacgaguuccagaaccaaagauuuuccgcugaagugcugagcucccuucggcagcugaaucucgccggagugcgcaugaccccugucaaauguacggugguugcggcugugcugggcucugggagacaugcccucgaugaggucaaccuggccagcugccagcuugaccccgcuggacugcggacacuccugccuguguuccugcgcgccagaaaacuuggccugcagcucaacucccuggggcccgaggcguguaaggaccuccgggaucugcuucugcacgaccaaugccagaucaccacccucagacugucuaauaacccccugacagcugccggcguugccgugcuuauggaaggacuggcuggcaauaccagcgucacacaccucucccugcuccauacggggcugggagaugagggccuugaacugcuggccgcucagcucgaccgcaaccggcaacugcaggagcuuaauguggccuauaacggggcgggagauaccgccgcucuggcccucgcuagagccgcccgcgaacacccuagccuggagcuccugcaucuuuacuuuaaugagcugucuuccgaaggccggcagguucugagagaccucgggggcgcugcggagggaggcgcccgcguggucgugagccugacagaagggaccgcugugucugaguauugguccgucauccuuagcgaaguucagcggaaccuuaauucuugggauagagcccgcgugcaacggcaccucgagcugcuccugagagaccuugaggauagccggggagccacacugaacccguggcgcaaggcucagcugcucagaguggaaggcgagguccgggcccugcuugaacagcugggguccagcggaucuuga

SEQ ID NO: 9137 - protein, 1093 aa, Artificial Sequence
  NLRP14__Homo_sapiens__Q86W24
MADSSSSSFFPDFGLLLYLEELNKEELNTFKLFLKETMEPEHGLTPWNEVKKARREDLANLMKKYYPGEKAWSVSLKIFGKMNLKDLCERAKEEINWSAQTIGPDDAKAGETQEDQEAVLGDGTEYRNRIKEKFCITWDKKSLAGKPEDFHHGIAEKDRKLLEHLFDVDVKTGAQPQIVVLQGAAGVGKTTLVRKAMLDWAEGSLYQQRFKYVFYLNGREINQLKERSFAQLISKDWPSTEGPIEEIMYQPSSLLFIIDSFDELNFAFEEPEFALCEDWTQEHPVSFLMSSLLRKVMLPEASLLVTTRLTTSKRLKQLLKNHHYVELLGMSEDAREEYIYQFFEDKRWAMKVFSSLKSNEMLFSMCQVPLVCWAACTCLKQQMEKGGDVTLTCQTTTALFTCYISSLFTPVDGGSPSLPNQAQLRRLCQVAAKGIWTMTYVFYRENLRRLGLTQSDVSSFMDSNIIQKDAEYENCYVFTHLHVQEFFAAMFYMLKGSWEAGNPSCQPFEDLKSLLQSTSYKDPHLTQMKCFLFGLLNEDRVKQLERTFNCKMSLKIKSKLLQCMEVLGNSDYSPSQLGFLELFHCLYETQDKAFISQAMRCFPKVAINICEKIHLLVSSFCLKHCRCLRTIRLSVTVVFEKKILKTSLPTNTWDGDRITHCWQDLCSVLHTNEHLRELDLYHSNLDKSAMNILHHELRHPNCKLQKLLLKFITFPDGCQDISTSLIHNKNLMHLDLKGSDIGDNGVKSLCEALKHPECKLQTLRLESCNLTVFCCLNISNALIRSQSLIFLNLSTNNLLDDGVQLLCEALRHPKCYLERLSLESCGLTEAGCEYLSLALISNKRLTHLCLADNVLGDGGVKLMSDALQHAQCTLKSLVLRRCHFTSLSSEYLSTSLLHNKSLTHLDLGSNWLQDNGVKLLCDVFRHPSCNLQDLELMGCVLTNACCLDLASVILNNPNLRSLDLGNNDLQDDGVKILCDALRYPNCNIQRLGLEYCGLTSLCCQDLSSALICNKRLIKMNLTQNTLGYEGIVKLYKVLKSPKCKLQVLGLCKEAFDEEAQKLLEAVGVSNPHLIIKPDCNYHNEEDVSWWWCF

SEQ ID NO: 9138 - RNA, 3282 nt, Artificial Sequence
  NLRP14__Homo_sapiens__AAO18165
auggcagauucaucaucaucuucuuucuuuccugauuuugggcugcuauuguauuuggaggagcuaaacaaagaggaauuaaauacauucaaguuauuccuaaaggagaccauggaaccugagcauggccugacacccuggaaugaagugaagaaggccaggcgggaggaccuggccaauuugaugaagaaauauuauccaggagagaaagccuggagugugucucucaaaaucuuuggcaagaugaaccugaaggaucugugugagagagcgaaagaagagaucaacuggucggcccagacuauaggaccagaugaugccaaggcuggagagacacaagaagaucaggaggcagugcugggugauggaacagaauacagaaauagaauaaaggaaaaauuuugcaucacuugggacaagaagucuuuggcuggaaagccugaagauuuccaucauggaauugcagagaaagauagaaaacuguuggaacacuuguucgauguggaugucaaaaccggugcacagccacagaucguggugcuucagggagcugcuggaguugggaaaacaaccuuggugagaaaggcaauguuagauugggcagagggcagucucuaccagcagagguuuaaguauguuuuuuaucucaaugggagagaaauuaaccagcugaaagagagaagcuuugcucaauugauaucaaaggacuggcccagcacagaaggccccauugaagaaaucauguaccagccaaguagccucuuguuuauuauugacaguuucgaugaacugaacuuugccuuugaagaaccugaguuugcacugugcgaagacuggacccaagaacacccaguguccuuccucaugaguaguuugcugaggaaagugaugcucccugaggcauccuuauuggugacaacaagacucacaacuucuaagagacuaaagcaguuguugaagaaucaccauuauguagagcuacuaggaaugucugaggaugcaagagaggaguauauuuaccaguuuuuugaagauaagaggugggccaugaaaguauucaguucacuaaaaagcaaugagaugcuguuuagcaugugccaagucccccuagugugcugggccgcuuguacuugucugaagcagcaaauggagaaggguggugaugucacauugaccugccaaacaaccacagcucuguuuaccugcuauauuucuagcuuguucacaccaguagauggaggcucuccuagucuacccaaccaagcccagcugagaagacugugccaagucgcugccaaaggaauauggacuaugacuuacguguuuuacagagaaaaucucagaaggcuuggguuaacucaaucugaugucucuaguuuuauggacagcaauauuauucagaaggacgcagaguaugaaaacugcuauguguucacccaccuucauguucaggaguuuuuugcagcuauguucuauauguugaaaggcaguugggaagcugggaacccuuccugccagccuuuugaagauuugaagucauuacuucaaagcacaaguuauaaagacccccauuugacacagaugaagugcuuuuuguuuggccuuuugaaugaagaucgaguaaaacaacuggagaggacuuuuaacuguaaaaugucacugaagauaaaaucaaaguuacuucaguguauggaaguauuaggaaacagugacuauucuccaucacagcugggauuucuggaguuguuucacugucuguaugagacucaagauaaagcguuuauaagccaggcaaugagauguuucccaaagguugccauuaauauuugugagaaaauacauuugcuuguaucuucuuucugccuuaagcacugccgguguuugcggaccaucaggcugucuguaacugugguauuugagaagaagauauuaaaaacaagccucccaacuaacacuugggauggugaucgcauuacucacuguuggcaagaucucuguucugugcuucauacaaaugaacacuugagagaauuggaccuguaccauagcaaccuugauaaaucagcaaugaauauccugcaucaugaacuaaggcacccaaacuguaaacuacaaaagcuacuguugaaauuuaucacuuucccugaugguugucaggauaucucuacuucuuugauucauaacaagaaucugaugcaucuugaccuaaaagggagugauauaggggauaauggaguaaagucauugugugaggccuugaaacacccagaguguaaacuacagacucucaggcuggaaucuugcaaccuaacuguauuuuguugucuaaauauaucuaaugcucucaucagaagccagagccugauauuucugaaucugucaaccaauaaucuguuggaugauggagugcagcuuuugugugaggccuuaagacauccaaaguguuaucuagagagacuguccuuagaaagcuguggucucacagaggcuggcugugaguaucuuucuuuggcucucaucagcaauaaaagacugacacauuugugcuuggcagacaaugucuugggugaugguggaguaaagcuuaugagugaugcccugcaacaugcacaauguacucugaagagccuugugcugaggcguugccauuucacuucacuuagcagugaauaucugucaacuucucuucuacacaacaagagccugacgcaucuggaucuaggaucaaacuggcuacaagacaauggagugaagcuucugugugaugucuuucggcauccaagcuguaaucuucaggacuuggaauugaugggcuguguucucacuaaugcauguugucuggaucuggcuucuguuauuuugaauaacccaaaccugaggagccuggaccuugggaacaacgauuugcaggaugauggagugaaaauucugugugaugcuuugagauauccaaacuguaacauucagaggcucggguuggaauacugugguuugacaucucucugcugucaagaucucuccucugcucuuaucugcaacaaaagacugauaaaaaugaaucugacacagaauaccuuaggauaugaaggaauugugaaguuauauaaagucuugaagucuccuaaguguaaacuacaaguucuaggguugugcaaagaggcauuugaugaggaagcccagaagcugcuggaagcugugggaguuagcaauccacacuuaaucauuaagccagauuguaacuaucauaaugaagaagaugugucuugguggugguguuucuga

SEQ ID NO: 9139 - RNA, 3282 nt, Artificial Sequence
  derived and/or modified sequence opt1 from NLRP14__Homo_sapiens__AAO18165
auggccgacagcuccagcuccagcuucuuccccgacuucggccugcuccuguaccuggaggagcucaacaaggaggagcugaacaccuucaagcuguuccucaaggagaccauggagccggagcacgggcugacgcccuggaacgaggugaagaaggcccgccgggaggaccuggcgaaccucaugaagaaguacuaccccggcgagaaggccugguccgucagccugaagaucuucgggaagaugaaccugaaggaccucugcgagcgcgccaaggaggagaucaacugguccgcccagaccaucggccccgacgacgccaaggcgggggagacccaggaggaccaggaggccgugcugggcgacggcaccgaguaccggaaccgcaucaaggagaaguucugcaucacgugggacaagaagucccuggccgggaagccggaggacuuccaccacggcaucgccgagaaggaccggaagcuccuggagcaccuguucgacguggacgucaagaccggggcgcagccccagaucguggugcuccagggcgccgccggggucggcaagaccacccuggugcgcaaggccaugcuggacugggccgagggcagccucuaccagcagcgguucaaguacguguucuaccugaacgggcgcgagaucaaccagcugaaggagcggagcuucgcgcagcucaucuccaaggacuggcccagcacggagggccccaucgaggagaucauguaccagccguccagccugcuguucaucaucgacuccuucgacgagcucaacuucgccuucgaggagcccgaguucgcccugugcgaggacuggacccaggagcaccccgucagcuuccugauguccagccuccugcgcaaggugaugcugcccgaggccucccuccuggugaccacccggcugacgaccagcaagcgccucaagcagcugcugaagaaccaccacuacgucgagcuccuggggaugagcgaggacgcccgggaggaguacaucuaccaguucuucgaggacaagcgcugggcgaugaagguguucuccagccugaaguccaacgagaugcuguucagcaugugccaggugccgcuggucugcugggccgccugcacgugccugaagcagcagauggagaagggcggcgacgugacccugaccugccagaccaccaccgcccucuucacgugcuacaucuccagccuguucacccccguggacgggggcucccccagccuccccaaccaggcccagcugcggcgccugugccaggucgcggccaaggggaucuggaccaugaccuacguguucuaccgggagaaccugcgccggcucggccugacgcaguccgacgugagcuccuucauggacagcaacaucauccagaaggacgccgaguacgagaacugcuacgucuucacccaccuccacgugcaggaguucuucgccgccauguucuacaugcucaagggguccugggaggcgggcaacccgagcugccagcccuucgaggaccugaagucccugcuccagagcaccuccuacaaggacccccaccugacccagaugaagugcuuccuguucggccuccugaacgaggaccgcgugaagcagcuggagcggacguucaacugcaagaugagccucaagaucaaguccaagcugcugcagugcauggagguccucgggaacagcgacuacagccccucccagcugggcuuccuggagcuguuccacugccuguacgagacccaggacaaggccuucaucagccaggccaugcgcugcuucccgaagguggccaucaacaucugcgagaagauccaccuccucgucuccagcuucugccugaagcacugccgcugccugcggaccauccgccucuccgugaccguggucuucgagaagaagauccugaagacgagccugcccaccaacaccugggacggggaccggaucacccacugcuggcaggaccucugcuccgugcugcacacgaacgagcaccuccgcgagcuggaccuguaccacagcaaccuggacaaguccgcgaugaacauccuccaccacgagcugcggcaccccaacugcaagcugcagaagcuccugcugaaguucaucaccuuccccgacggcugccaggacaucagcaccucccucauccacaacaagaaccugaugcaccuggaccucaaggggagcgacaucggcgacaacggcgugaagucccugugcgaggcccugaagcacccggagugcaagcuccagacccugcgccuggagagcugcaaccucaccgucuucugcugccugaacaucuccaacgcccugauccggagccagucccucaucuuccugaaccugagcacgaacaaccuccuggacgacggggugcagcugcucugcgaggcccugcgccaccccaagugcuaccuggagcggcucagccuggaguccugcggccugaccgaggccgggugcgaguaccucagccuggcgcugaucuccaacaagcgccucacccaccugugccuggccgacaacgugcucggcgacgggggcgucaagcugaugagcgacgcccugcagcacgcccagugcacccucaagucccuggugcugcggcgcugccacuucacgagccucuccagcgaguaccuguccaccagccugcuccacaacaagucccugacccaccuggaccucggcagcaacuggcugcaggacaacggggugaagcugcucugcgacgucuuccggcaccccuccugcaaccugcaggaccuggagcucaugggcugcgugcugaccaacgccugcugccuggaccucgcgagcgugauccugaacaaccccaaccugcgcucccucgaccuggggaacaacgaccugcaggacgacggcgucaagauccugugcgacgcccuccgguacccgaacugcaacauccagcgccugggccuggaguacugcgggcucacgagccugugcugccaggaccuguccagcgcccucaucugcaacaagcggcugaucaagaugaaccugacccagaacacccucggcuacgaggggaucgugaagcuguacaaggugcugaagucccccaagugcaagcuccagguccugggccugugcaaggaggccuucgacgaggaggcccagaagcuccuggaggcggugggggugagcaacccccaccugaucaucaagccggacugcaacuaccacaacgaggaggacgucagcuggugguggugcuucuga

SEQ ID NO: 9140 - RNA, 3282 nt, Artificial Sequence
  derived and/or modified sequence opt2 from NLRP14__Homo_sapiens__AAO18165
auggccgacuccuccuccuccuccuucuuccccgacuucggccuccuccucuaccucgaggagcucaacaaggaggagcucaacaccuucaagcucuuccucaaggagaccauggagcccgagcacggccucacccccuggaacgaggucaagaaggcccgccgcgaggaccucgccaaccucaugaagaaguacuaccccggcgagaaggccugguccgucucccucaagaucuucggcaagaugaaccucaaggaccucugcgagcgcgccaaggaggagaucaacugguccgcccagaccaucggccccgacgacgccaaggccggcgagacccaggaggaccaggaggccguccucggcgacggcaccgaguaccgcaaccgcaucaaggagaaguucugcaucaccugggacaagaagucccucgccggcaagcccgaggacuuccaccacggcaucgccgagaaggaccgcaagcuccucgagcaccucuucgacgucgacgucaagaccggcgcccagccccagaucgucguccuccagggcgccgccggcgucggcaagaccacccucguccgcaaggccaugcucgacugggccgagggcucccucuaccagcagcgcuucaaguacgucuucuaccucaacggccgcgagaucaaccagcucaaggagcgcuccuucgcccagcucaucuccaaggacuggcccuccaccgagggccccaucgaggagaucauguaccagcccuccucccuccucuucaucaucgacuccuucgacgagcucaacuucgccuucgaggagcccgaguucgcccucugcgaggacuggacccaggagcaccccgucuccuuccucauguccucccuccuccgcaaggucaugcuccccgaggccucccuccucgucaccacccgccucaccaccuccaagcgccucaagcagcuccucaagaaccaccacuacgucgagcuccucggcauguccgaggacgcccgcgaggaguacaucuaccaguucuucgaggacaagcgcugggccaugaaggucuucuccucccucaaguccaacgagaugcucuucuccaugugccaggucccccucgucugcugggccgccugcaccugccucaagcagcagauggagaagggcggcgacgucacccucaccugccagaccaccaccgcccucuucaccugcuacaucuccucccucuucacccccgucgacggcggcucccccucccuccccaaccaggcccagcuccgccgccucugccaggucgccgccaagggcaucuggaccaugaccuacgucuucuaccgcgagaaccuccgccgccucggccucacccaguccgacgucuccuccuucauggacuccaacaucauccagaaggacgccgaguacgagaacugcuacgucuucacccaccuccacguccaggaguucuucgccgccauguucuacaugcucaagggcuccugggaggccggcaaccccuccugccagcccuucgaggaccucaagucccuccuccaguccaccuccuacaaggacccccaccucacccagaugaagugcuuccucuucggccuccucaacgaggaccgcgucaagcagcucgagcgcaccuucaacugcaagaugucccucaagaucaaguccaagcuccuccagugcauggagguccucggcaacuccgacuacucccccucccagcucggcuuccucgagcucuuccacugccucuacgagacccaggacaaggccuucaucucccaggccaugcgcugcuuccccaaggucgccaucaacaucugcgagaagauccaccuccucgucuccuccuucugccucaagcacugccgcugccuccgcaccauccgccucuccgucaccgucgucuucgagaagaagauccucaagaccucccuccccaccaacaccugggacggcgaccgcaucacccacugcuggcaggaccucugcuccguccuccacaccaacgagcaccuccgcgagcucgaccucuaccacuccaaccucgacaaguccgccaugaacauccuccaccacgagcuccgccaccccaacugcaagcuccagaagcuccuccucaaguucaucaccuuccccgacggcugccaggacaucuccaccucccucauccacaacaagaaccucaugcaccucgaccucaagggcuccgacaucggcgacaacggcgucaagucccucugcgaggcccucaagcaccccgagugcaagcuccagacccuccgccucgaguccugcaaccucaccgucuucugcugccucaacaucuccaacgcccucauccgcucccagucccucaucuuccucaaccucuccaccaacaaccuccucgacgacggcguccagcuccucugcgaggcccuccgccaccccaagugcuaccucgagcgccucucccucgaguccugcggccucaccgaggccggcugcgaguaccucucccucgcccucaucuccaacaagcgccucacccaccucugccucgccgacaacguccucggcgacggcggcgucaagcucauguccgacgcccuccagcacgcccagugcacccucaagucccucguccuccgccgcugccacuucaccucccucuccuccgaguaccucuccaccucccuccuccacaacaagucccucacccaccucgaccucggcuccaacuggcuccaggacaacggcgucaagcuccucugcgacgucuuccgccaccccuccugcaaccuccaggaccucgagcucaugggcugcguccucaccaacgccugcugccucgaccucgccuccgucauccucaacaaccccaaccuccgcucccucgaccucggcaacaacgaccuccaggacgacggcgucaagauccucugcgacgcccuccgcuaccccaacugcaacauccagcgccucggccucgaguacugcggccucaccucccucugcugccaggaccucuccuccgcccucaucugcaacaagcgccucaucaagaugaaccucacccagaacacccucggcuacgagggcaucgucaagcucuacaagguccucaagucccccaagugcaagcuccagguccucggccucugcaaggaggccuucgacgaggaggcccagaagcuccucgaggccgucggcgucuccaacccccaccucaucaucaagcccgacugcaacuaccacaacgaggaggacgucuccuggugguggugcuucuga

SEQ ID NO: 9141 - RNA, 3282 nt, Artificial Sequence
  derived and/or modified sequence opt3 from NLRP14__Homo_sapiens__AAO18165
auggccgacagcuccucuucaaguuucuuucccgauuucggccugcuccuuuaccuggaggaauugaacaaggaggaauuaaauaccuuuaaacuguuccuaaaggagacaauggaaccugagcacgggcucacuccauggaacgaggugaaaaaggcuagaagggaagaccuggcaaaucuuaugaaaaaguauuacccgggagagaaggccuggagcgucucccugaaaaucuuugguaagaugaacuugaaagaucucugcgaacgggcgaaggaggagauuaauuggucugcucagacgauaggccccgacgaugccaaagcaggggaaacccaagaggaccaggaagccguucugggagauggcacagaguaucgcaaccgaaucaaggaaaaguucuguauuacuugggacaaaaagucgcuggcugguaaaccugaggauuuucaucacgggaucgcagagaaggaccguaaacucuuagaacaucuguucgauguggacguaaagaccggagcccagccacagauugugguccuucaaggcgcugccggcguggggaaaacaaccuugguuagaaaggcgaugcuggauugggcagagggaucacuauaccagcagagguuuaaguauguguucuaccucaauggucgggaaaucaaccagcugaaagagcgcagcuuugcccaacuuauaaguaaggacuggcccuccacugaaggcccuaucgaggagauuauguaucagccaucuagccuguuguucaucauugacuccuuugaugaacucaauuucgcuuucgaggaacccgaguuugcccugugcgaagacuggacacaggagcacccugucucauucuuaaugaguagccugcucagaaaagugaugcuuccagaggcaucucuguugguaaccacgaggcuaacuaccuccaagcggcugaaacagcuccugaagaaccaucacuacguugaacuucuggggaugucagaggaugcucgcgaagaguacaucuaucaauuuuucgaggacaagcgaugggccaugaaaguguuuagcaguuugaagucuaaugaaaugcuguucuccaugugucaggucccgcucgugugcugggcggccuguacaugcuuaaaacagcaaauggagaagggaggcgaugugacucugaccugucagacaaccacggcacuauuuacuugcuacauaagcucucucuucacacccgucgacggugggucgccuucccugccaaaccaggcucagcuuagaagguugugucaaguugccgcuaaaggaauuuggaccaugacuuauguguuuuaccgggaaaaucugcgucgccucggccugacacagucagauguaaguagcuucauggacuccaacaucauucagaaggaugccgaguaugaaaauugcuacguguuuacccaccuucauguccaggaguucuuugcagccauguucuauaugcugaagggcucuugggaggcugggaaccccagcugucaaccuuucgaagacuugaaaucacuccugcagaguacguccuacaaggauccacacuuaacccagaugaaaugcuuucuguucggacuacucaacgaggacagagugaagcagcuggaaaggacauuuaauugcaaaaugagccuuaagaucaagucuaaauugcugcaauguauggagguucucgguaacucagacuacagucccagccagcugggcuucuuagaacuguuucauugccuuuaugagacucaggauaaggcguucaucucccaggcaaugcgguguuuuccgaaaguggccauuaauauaugcgagaagauccacuugcucgucucuucguucugucugaaacacugccgaugucuacgcaccauuagacugagcgugacaguaguuuuugaaaagaaaauccucaagacuucccugccuaccaacacaugggacggggauaggauaacccauugcuggcaagaccuuuguucaguguugcacacuaaugagcaucugcgggaauuagaucucuaccacaguaaccuggacaagucugcuaugaauauucuucaucacgagcugcgccaccccaacugcaaauugcagaagcuccugcuaaaauucaucacguuuccagauggaugucaggacaucagcacaucccugauucauaauaagaaccucaugcaccuggaucuuaaaggcucagacaucggugauaauggggucaagagcuugugcgaagcccugaagcauccugagugcaaauuacaaacccucagacuggagucuuguaaccuuacuguguucugcugucugaauauuuccaacgcacuaauaaggagucagagccucaucuuucugaauuugucuaccaacaaccuguuagacgauggcguccagcuccugugcgaagcccuucgucaccccaaguguuaucuggagcgguugucccucgaaucaugcggacugacagaggcuggcugugaguaccuaagucuggcccuuauuagcaauaaacgacucacccaccugugcuuggcagacaacgugcugggggacggagguguuaaguuaaugucggaugcgcuccagcaugcucaauguacucugaaaucccuugugcugagaaggugccacuucacaucuuugagcucagaauaucucaguacgucccugcuacauaauaagucucugacccaccuugaccucggcagcaacuggcugcaggauaaugggguaaaguuguuaugugacgucuuccgccauccauccugcaaccugcaggaucucgagcugaugggaugcgugcuuacuaaugccuguugccuggacuuggcaucaguuauccuaaacaaucccaaccugcggagccucgaucugggcaauaacgaccuucaggaugacggugugaaaaucuuaugugaugcccugagauacccuaauugcaacauucaaaggcucggguuggaauauuguggccugacaagucucugcugucaggaccugucuuccgcucuuauaugcaauaagcgccugaucaaaaugaacuugacccagaacacacuaggauacgagggcauugucaagcuguacaaagugcucaagagcccaaaguguaaauuacagguacuggggcuuugcaaggaagccuuugaugaggaggcacaaaaacugcucgaagcugugggaguuucgaauccgcacuugaucauuaagcccgacuguaacuaucacaaugaggaagacgucucauggugguggugcuucuga

SEQ ID NO: 9142 - RNA, 3282 nt, Artificial Sequence
  derived and/or modified sequence opt4 from NLRP14__Homo_sapiens__AAO18165
auggccgacagcagcagcagcagcuucuuccccgacuucggccugcugcuguaccuggaggagcugaacaaggaggagcugaacaccuucaagcuguuccugaaggagaccauggagcccgagcacggccugacccccuggaacgaggugaagaaggccagaagagaggaccuggccaaccugaugaagaaguacuaccccggcgagaaggccuggagcgugagccugaagaucuucggcaagaugaaccugaaggaccugugcgagagagccaaggaggagaucaacuggagcgcccagaccaucggccccgacgacgccaaggccggcgagacccaggaggaccaggaggccgugcugggcgacggcaccgaguacagaaacagaaucaaggagaaguucugcaucaccugggacaagaagagccuggccggcaagcccgaggacuuccaccacggcaucgccgagaaggacagaaagcugcuggagcaccuguucgacguggacgugaagaccggcgcccagccccagaucguggugcugcagggcgccgccggcgugggcaagaccacccuggugagaaaggccaugcuggacugggccgagggcagccuguaccagcagagauucaaguacguguucuaccugaacggcagagagaucaaccagcugaaggagagaagcuucgcccagcugaucagcaaggacuggcccagcaccgagggccccaucgaggagaucauguaccagcccagcagccugcuguucaucaucgacagcuucgacgagcugaacuucgccuucgaggagcccgaguucgcccugugcgaggacuggacccaggagcaccccgugagcuuccugaugagcagccugcugagaaaggugaugcugcccgaggccagccugcuggugaccaccagacugaccaccagcaagagacugaagcagcugcugaagaaccaccacuacguggagcugcugggcaugagcgaggacgccagagaggaguacaucuaccaguucuucgaggacaagagaugggccaugaagguguucagcagccugaagagcaacgagaugcuguucagcaugugccaggugccccuggugugcugggccgccugcaccugccugaagcagcagauggagaagggcggcgacgugacccugaccugccagaccaccaccgcccuguucaccugcuacaucagcagccuguucacccccguggacggcggcagccccagccugcccaaccaggcccagcugagaagacugugccagguggccgccaagggcaucuggaccaugaccuacguguucuacagagagaaccugagaagacugggccugacccagagcgacgugagcagcuucauggacagcaacaucauccagaaggacgccgaguacgagaacugcuacguguucacccaccugcacgugcaggaguucuucgccgccauguucuacaugcugaagggcagcugggaggccggcaaccccagcugccagcccuucgaggaccugaagagccugcugcagagcaccagcuacaaggacccccaccugacccagaugaagugcuuccuguucggccugcugaacgaggacagagugaagcagcuggagagaaccuucaacugcaagaugagccugaagaucaagagcaagcugcugcagugcauggaggugcugggcaacagcgacuacagccccagccagcugggcuuccuggagcuguuccacugccuguacgagacccaggacaaggccuucaucagccaggccaugagaugcuuccccaagguggccaucaacaucugcgagaagauccaccugcuggugagcagcuucugccugaagcacugcagaugccugagaaccaucagacugagcgugaccgugguguucgagaagaagauccugaagaccagccugcccaccaacaccugggacggcgacagaaucacccacugcuggcaggaccugugcagcgugcugcacaccaacgagcaccugagagagcuggaccuguaccacagcaaccuggacaagagcgccaugaacauccugcaccacgagcugagacaccccaacugcaagcugcagaagcugcugcugaaguucaucaccuuccccgacggcugccaggacaucagcaccagccugauccacaacaagaaccugaugcaccuggaccugaagggcagcgacaucggcgacaacggcgugaagagccugugcgaggcccugaagcaccccgagugcaagcugcagacccugagacuggagagcugcaaccugaccguguucugcugccugaacaucagcaacgcccugaucagaagccagagccugaucuuccugaaccugagcaccaacaaccugcuggacgacggcgugcagcugcugugcgaggcccugagacaccccaagugcuaccuggagagacugagccuggagagcugcggccugaccgaggccggcugcgaguaccugagccuggcccugaucagcaacaagagacugacccaccugugccuggccgacaacgugcugggcgacggcggcgugaagcugaugagcgacgcccugcagcacgcccagugcacccugaagagccuggugcugagaagaugccacuucaccagccugagcagcgaguaccugagcaccagccugcugcacaacaagagccugacccaccuggaccugggcagcaacuggcugcaggacaacggcgugaagcugcugugcgacguguucagacaccccagcugcaaccugcaggaccuggagcugaugggcugcgugcugaccaacgccugcugccuggaccuggccagcgugauccugaacaaccccaaccugagaagccuggaccugggcaacaacgaccugcaggacgacggcgugaagauccugugcgacgcccugagauaccccaacugcaacauccagagacugggccuggaguacugcggccugaccagccugugcugccaggaccugagcagcgcccugaucugcaacaagagacugaucaagaugaaccugacccagaacacccugggcuacgagggcaucgugaagcuguacaaggugcugaagagccccaagugcaagcugcaggugcugggccugugcaaggaggccuucgacgaggaggcccagaagcugcuggaggccgugggcgugagcaacccccaccugaucaucaagcccgacugcaacuaccacaacgaggaggacgugagcuggugguggugcuucuga

SEQ ID NO: 9143 - RNA, 3282 nt, Artificial Sequence
  derived and/or modified sequence opt5 from NLRP14__Homo_sapiens__AAO18165
auggccgacagcuccucuagcuccuucuuucccgauuucggccugcuccuguaccuugaggaacugaacaaggaggaacucaauaccuuuaaacuguuccuuaaggagacaauggaaccugagcacgggcugacgccguggaacgaggugaaaaaggcuagacgggaagaccucgccaaucugaugaaaaaguauuaccccggagagaaggcguggucugucagccugaaaaucuuuggcaagaugaaccucaaagaucugugcgaacgcgcuaaggaggagauuaauugguccgcccagaccaucgggccugacgaugccaaagcuggagaaacacaagaggaccaggaagccguucuuggcgaugggaccgaguauagaaaccggauuaaggaaaaguucuguaucacaugggacaaaaagucucuggcuggaaaacccgaggauuuucaucacggcauugccgagaaggaccgcaaacuccuggaacaucuuuucgauguggacgugaagaccggcgcgcagccucagaucgucgugcugcaaggggccgcuggaguuggcaaaacaacccucgugagaaaggccaugcuggauugggcugaggggagccuguaccagcagcgguuuaaguaugucuucuaccucaauggacgcgaaaucaaccagcugaaagagagauccuuugcccaacuuauuagcaaggacuggcccucuacggaaggcccuaucgaggagauuauguaucagccguccagccugcuguucaucauugacucuuuugaugaacugaauuucgcguucgaggaacccgaguuugcccuuugcgaagacuggacccaggagcacccuguguccuuccugaugagcucucuccugcggaaaguuaugcugcccgaggcuucccuccuggugacaacccgccuuacaaccagcaagagacugaaacagcuccugaagaaccaucacuacgucgaacuucuggggauguccgaggaugcccgggaagaguacaucuaucaauuuuucgaggacaagcgcugggcuaugaaaguguuuucuagccucaaguccaaugaaaugcuguucagcaugugucaggugccucuggucugcugggccgccuguacgugccucaaacagcaaauggagaagggaggcgauguuacacugaccugucagacaaccaccgcucuuuuuacaugcuacauuucuucccuguucacgcccguggacggcgggagcccgucucucccuaaccaggcgcagcugagacggcugugucaaguggccgcuaaaggaaucuggaccaugacauaugucuuuuaccgcgaaaaucuuagacggcucggccugacccagagcgauguguccucuuucauggacagcaacaucauucagaaggaugccgaguaugaaaauugcuacguuuuuacacaccuccaugugcaggaguucuuugccgcuauguucuauaugcucaagggguccugggaggccggaaaccccagcugucaaccuuucgaagaccugaaaucucuucugcaguccaccagcuacaaggauccccaccucacgcagaugaaaugcuuucuguucggccugcuuaacgaggacagagucaagcagcucgaacgcacauuuaauugcaaaaugucucugaagaucaaguccaaacugcuccaauguauggaggugcuggggaacagcgacuacucccccucucagcuuggauuccuggaacucuuucauugccuguaugagacccaggauaaggcguucauuagccaggcuaugcgguguuuuccuaaaguugccaucaauauuugcgagaagauccaccuucuuguguccucuuucugucucaaacacugcagaugucugcgcaccauccggcugagcgucacaguggucuuugaaaagaaaauucucaagaccucccugccgacaaacacgugggacggcgauagaaucacccauugcuggcaagaccuuuguagcgugcugcacacaaaugagcaucuccgcgaacuggaucuguaccacucuaaccuugacaaguccgccaugaauauucuccaucacgagcugcggcaccccaacugcaaacugcagaagcuccugcuuaaauucaucaccuuuccugauggcugucaggacauuagcacaucucugauccauaauaagaaccucaugcaccuggaucugaaaggguccgacaucggagauaauggcguuaagagccuuugcgaagcucugaagcaucccgagugcaaacuccaaacccugagacucgagucuuguaaccugacgguguucugcugucuuaauauuagcaacgcccugauccgcucccagagccucauuuuucugaaucugucuaccaacaaccuucuggacgaugggguccagcuccugugcgaagcucuccggcacccuaaguguuaucuggagagacuuucccuggaaagcugcggacucacagaggccggcugugaguaccugucccuggcgcuuaucucuaauaaacgccugacccaccucugccuggccgacaacgugcucggggacggcggaguuaagcugaugagcgaugcucugcagcaugcccaauguacacugaaaucccuggugcuccggagaugccacuucaccucucugagcuccgaauaucuuucuacgagccugcuccauaauaagucccugacacaccucgaccugggcagcaacuggcuucaggauaauggggucaagcugcugugugacguguuccggcaucccucuugcaaccuccaggaucuggagcuuaugggaugcgugcugaccaaugcuuguugccucgaccuggccuccguuauucucaacaauccgaaccugcgcagccuugaucugggcaauaacgaccugcaggaugacggggucaaaauccucugugaugcgcugagauacccuaauugcaacauucaacggcuuggacuggaauauuguggccucacaucucugugcugucaggaccucuccagcgcccugaucugcaauaagagacuuaucaaaaugaaccugacccagaacacccugggguacgagggcauugugaagcucuacaaagugcugaagucucccaaguguaaacuucagguccugggacucugcaaggaggcuuuugaugaagaggcccaaaaacugcuggaagcugugggcguuuccaauccucaccucaucauuaagcccgacuguaacuaucacaaugaggaagacgugagcuggugguggugcuucuga

SEQ ID NO: 9144 - protein, 779 aa, Artificial Sequence
  NOD1__Homo_sapiens__G3XAL1
MEEQGHSEMEIIPSESHPHIQLLKSNRELLVTHIRNTQCLVDNLLKNDYFSAEDAEIVCACPTQPDKVRKILDLVQSKGEEVSEFFLYLLQQLADAYVDLRPWLLEIGFSPSLLTQSKVVVNTDPVSRYTQQLRHHLGRDSKFVLCYAQKEELLLEEIYMDTIMELVGFSNESLGSLNSLACLLDHTTGILNEQGETIFILGDAGVGKSMLLQRLQSLWATGRLDAGVKFFFHFRCRMFSCFKESDRLCLQDLLFKHYCYPERDPEEVFAFLLRFPHVALFTFDGLDELHSDLDLSRVPDSSCPWEPAHPLVLLANLLSGKLLKGASKLLTARTGIEVPRQFLRKKVLLRGFSPSHLRAYARRMFPERALQDRLLSQLEANPNLCSLCSVPLFCWIIFRCFQHFRAAFEGSPQLPDCTMTLTDVFLLVTEVHLNRMQPSSLVQRNTRSPVETLHAGRDTLCSLGQVAHRGMEKSLFVFTQEEVQASGLQERDMQLGFLRALPELGPGGDQQSYEFFHLTLQAFFTAFFLVLDDRVGTQELLRFFQEWMPPAGAATTSCYPPFLPFQCLQGSGPAREDLFKNKDHFQFTNLFLCGLLSKAKQKLLRHLVPAAALRRKRKALWAHLFSSLRGYLKSLPRVQVESFNQVQAMPTFIWMLRCIYETQSQKVGQLAARGICANYLKLTYCNACSADCSALSFVLHHFPKRLALDLDNNNLNDYGVRELQPCFSRLTVLRLSVNQITDGGVKVLSEELTKYKIVTYLGLWKSVDTICFKKQGLLK

SEQ ID NO: 9145 - RNA, 2340 nt, Artificial Sequence
  NOD1__Homo_sapiens__EAW93948
auggaagagcagggccacagugagauggaaauaaucccaucagagucucacccccacauucaauuacugaaaagcaaucgggaacuucuggucacucacauccgcaauacucagugucugguggacaacuugcugaagaaugacuacuucucggccgaagaugcggagauugugugugccugccccacccagccugacaagguccgcaaaauucuggaccugguacagagcaagggcgaggagguguccgaguucuuccucuacuugcuccagcaacucgcagaugccuacguggaccucaggccuuggcugcuggagaucggcuucuccccuucccugcucacucagagcaaagucguggucaacacugacccagugagcagguauacccagcagcugcgacaccaucugggccgugacuccaaguucgugcugugcuaugcccagaaggaggagcugcugcuggaggagaucuacauggacaccaucauggagcugguuggcuucagcaaugagagccugggcagccugaacagccuggccugccuccuggaccacaccaccggcauccucaaugagcagggugagaccaucuucauccugggugaugcuggggugggcaaguccaugcugcuacagcggcugcagagccucugggccacgggccggcuagacgcaggggucaaauucuucuuccacuuucgcugccgcauguucagcugcuucaaggaaagugacaggcugugucugcaggaccugcucuucaagcacuacugcuacccagagcgggaccccgaggagguguuugccuuccugcugcgcuucccccacguggcccucuucaccuucgauggccuggacgagcugcacucggacuuggaccugagccgcgugccugacagcuccugccccugggagccugcccacccccuggucuugcuggccaaccugcucagugggaagcugcucaagggggcuagcaagcugcucacagcccgcacaggcaucgaggucccgcgccaguuccugcggaagaaggugcuucuccggggcuucucccccagccaccugcgcgccuaugccaggaggauguuccccgagcgggcccugcaggaccgccugcugagccagcuggaggccaaccccaaccucugcagccugugcucugugccccucuucugcuggaucaucuuccggugcuuccagcacuuccgugcugccuuugaaggcucaccacagcugcccgacugcacgaugacccugacagaugucuuccuccuggucacugagguccaucugaacaggaugcagcccagcagccuggugcagcggaacacacgcagcccaguggagacccuccacgccggccgggacacucugugcucgcuggggcagguggcccaccggggcauggagaagagccucuuugucuucacccaggaggaggugcaggccuccgggcugcaggagagagacaugcagcugggcuuccugcgggcuuugccggagcugggccccgggggugaccagcaguccuaugaguuuuuccaccucacccuccaggccuucuuuacagccuucuuccucgugcuggacgacagggugggcacucaggagcugcucagguucuuccaggaguggaugcccccugcgggggcagcgaccacguccugcuauccucccuuccucccguuccagugccugcagggcagugguccggcgcgggaagaccucuucaagaacaaggaucacuuccaguucaccaaccucuuccugugcgggcuguuguccaaagccaaacagaaacuccugcggcaucuggugcccgcggcagcccugaggagaaagcgcaaggcccugugggcacaccuguuuuccagccugcggggcuaccugaagagccugccccgcguucaggucgaaagcuucaaccaggugcaggccaugcccacguucaucuggaugcugcgcugcaucuacgagacacagagccagaagguggggcagcuggcggccaggggcaucugcgccaacuaccucaagcugaccuacugcaacgccugcucggccgacugcagcgcccucuccuucguccugcaucacuuccccaagcggcuggcccuagaccuagacaacaacaaucucaacgacuacggcgugcgggagcugcagcccugcuucagccgccucacuguucucagacucagcguaaaccagaucacugacggugggguaaaggugcuaagcgaagagcugaccaaauacaaaauugugaccuauuugggacuuuggaaaucaguagacaccauaugcuucaaaaaacaggggcuauuaaaauga

SEQ ID NO: 9146 - RNA, 2340 nt, Artificial Sequence
  derived and/or modified sequence opt1 from NOD1__Homo_sapiens__EAW93948
auggaggagcagggccacagcgagauggagaucauccccuccgagagccacccgcacauccagcugcucaaguccaaccgcgagcugcuggugacccacauccggaacacccagugccucgucgacaaccugcugaagaacgacuacuucagcgccgaggacgccgagaucgugugcgcgugccccacgcagcccgacaaggugcgcaagauccucgaccugguccaguccaagggggaggaggugagcgaguucuuccuguaccuccugcagcagcuggccgacgccuacguggaccuccggcccuggcugcuggagaucggcuucuccccgagccuccugacccaguccaaggucguggugaacaccgaccccgucagccgcuacacccagcagcugcggcaccaccucgggcgcgacuccaaguucgugcugugcuacgcccagaaggaggagcugcuccuggaggagaucuacauggacacgaucauggagcuggugggcuucagcaacgagucccucgggagccugaacucccuggccugccuccuggaccacaccaccggcauccugaacgagcagggcgagaccaucuucauccucggggacgcgggcgucggcaagagcaugcugcugcagcggcuccagucccugugggccacggggcgccuggacgccggggugaaguucuucuuccacuuccggugccgcauguucagcugcuucaaggaguccgaccggcucugccugcaggaccugcuguucaagcacuacugcuaccccgagcgcgaccccgaggagguguucgccuuccugcugcgguucccgcacgucgcgcuguucaccuucgacggccuggacgagcugcacagcgaccucgaccugagccgcgugcccgacuccagcugccccugggagcccgcccacccgcuggugcuccuggccaaccugcuguccggcaagcuccugaagggggccagcaagcugcucaccgcccggaccggcaucgaggucccccgccaguuccugcggaagaaggugcugcuccgcggguucucccccagccaccuccgggcguacgcccgccggauguuccccgagcgcgcccugcaggaccgccuccugucccagcuggaggccaacccgaaccucugcagccugugcuccgugccccuguucugcuggaucaucuuccggugcuuccagcacuuccgcgccgcguucgagggcagcccccagcuccccgacugcacgaugacccugaccgacgucuuccugcucgugaccgaggugcaccugaaccggaugcagccguccagccugguccagcgcaacacgcggucccccguggagacccuccacgccggccgcgacacccugugcagccuggggcaggucgcccaccggggcauggagaagucccucuucguguucacccaggaggaggugcaggccagcgggcugcaggagcgcgacaugcagcugggcuuccuccgggcccugcccgagcuggggcccggcggcgaccagcaguccuacgaguucuuccaccucacgcugcaggcguucuucaccgccuucuuccugguccucgacgaccgcguggggacccaggagcugcugcgguucuuccaggaguggaugccgcccgccggcgccgccaccacgagcugcuacccgcccuuccuccccuuccagugccugcagggguccggccccgcgcgcgaggaccuguucaagaacaaggaccacuuccaguucaccaaccucuuccugugcgggcugcucagcaaggccaagcagaagcugcugcggcaccucgugcccgccgccgcgcugcgccggaagcgcaaggcccugugggcccaccucuucagcucccugcggggcuaccucaagagccucccgcgcguccagguggaguccuucaaccaggugcaggccaugcccaccuucaucuggaugcugcggugcaucuacgagacccagagccagaaggucggccagcuggccgcgcgcgggaucugcgccaacuaccucaagcugacguacugcaacgccugcuccgccgacugcagcgcccuguccuucgugcuccaccacuuccccaagcgccuggcgcuggaccucgacaacaacaaccugaacgacuacggcgugcgggagcugcagcccugcuucagccgccucaccguccugcggcuguccgugaaccagaucaccgacgggggcgugaagguccucagcgaggagcugaccaaguacaagaucgugacguaccuggggcucuggaaguccguggacaccaucugcuucaagaagcagggccugcugaaguga

SEQ ID NO: 9147 - RNA, 2340 nt, Artificial Sequence
  derived and/or modified sequence opt2 from NOD1__Homo_sapiens__EAW93948
auggaggagcagggccacuccgagauggagaucauccccuccgagucccacccccacauccagcuccucaaguccaaccgcgagcuccucgucacccacauccgcaacacccagugccucgucgacaaccuccucaagaacgacuacuucuccgccgaggacgccgagaucgucugcgccugccccacccagcccgacaagguccgcaagauccucgaccucguccaguccaagggcgaggaggucuccgaguucuuccucuaccuccuccagcagcucgccgacgccuacgucgaccuccgccccuggcuccucgagaucggcuucucccccucccuccucacccaguccaaggucgucgucaacaccgaccccgucucccgcuacacccagcagcuccgccaccaccucggccgcgacuccaaguucguccucugcuacgcccagaaggaggagcuccuccucgaggagaucuacauggacaccaucauggagcucgucggcuucuccaacgagucccucggcucccucaacucccucgccugccuccucgaccacaccaccggcauccucaacgagcagggcgagaccaucuucauccucggcgacgccggcgucggcaaguccaugcuccuccagcgccuccagucccucugggccaccggccgccucgacgccggcgucaaguucuucuuccacuuccgcugccgcauguucuccugcuucaaggaguccgaccgccucugccuccaggaccuccucuucaagcacuacugcuaccccgagcgcgaccccgaggaggucuucgccuuccuccuccgcuucccccacgucgcccucuucaccuucgacggccucgacgagcuccacuccgaccucgaccucucccgcguccccgacuccuccugccccugggagcccgcccacccccucguccuccucgccaaccuccucuccggcaagcuccucaagggcgccuccaagcuccucaccgcccgcaccggcaucgaggucccccgccaguuccuccgcaagaagguccuccuccgcggcuucucccccucccaccuccgcgccuacgcccgccgcauguuccccgagcgcgcccuccaggaccgccuccucucccagcucgaggccaaccccaaccucugcucccucugcuccgucccccucuucugcuggaucaucuuccgcugcuuccagcacuuccgcgccgccuucgagggcuccccccagcuccccgacugcaccaugacccucaccgacgucuuccuccucgucaccgagguccaccucaaccgcaugcagcccuccucccucguccagcgcaacacccgcucccccgucgagacccuccacgccggccgcgacacccucugcucccucggccaggucgcccaccgcggcauggagaagucccucuucgucuucacccaggaggagguccaggccuccggccuccaggagcgcgacaugcagcucggcuuccuccgcgcccuccccgagcucggccccggcggcgaccagcaguccuacgaguucuuccaccucacccuccaggccuucuucaccgccuucuuccucguccucgacgaccgcgucggcacccaggagcuccuccgcuucuuccaggaguggaugccccccgccggcgccgccaccaccuccugcuacccccccuuccuccccuuccagugccuccagggcuccggccccgcccgcgaggaccucuucaagaacaaggaccacuuccaguucaccaaccucuuccucugcggccuccucuccaaggccaagcagaagcuccuccgccaccucguccccgccgccgcccuccgccgcaagcgcaaggcccucugggcccaccucuucuccucccuccgcggcuaccucaagucccucccccgcguccaggucgaguccuucaaccagguccaggccaugcccaccuucaucuggaugcuccgcugcaucuacgagacccagucccagaaggucggccagcucgccgcccgcggcaucugcgccaacuaccucaagcucaccuacugcaacgccugcuccgccgacugcuccgcccucuccuucguccuccaccacuuccccaagcgccucgcccucgaccucgacaacaacaaccucaacgacuacggcguccgcgagcuccagcccugcuucucccgccucaccguccuccgccucuccgucaaccagaucaccgacggcggcgucaagguccucuccgaggagcucaccaaguacaagaucgucaccuaccucggccucuggaaguccgucgacaccaucugcuucaagaagcagggccuccucaaguga

SEQ ID NO: 9148 - RNA, 2340 nt, Artificial Sequence
  derived and/or modified sequence opt3 from NOD1__Homo_sapiens__EAW93948
auggaggaacagggccacagcgagauggaaaucauucccuccgagucucauccucacauacaacugcucaagucaaacagagaacuucuggugacccauaucaggaauacacagugcuuggucgacaacuuacugaaaaaugauuacuucagugccgaggacgcugagauuguuugugcaugcccaacucagccggauaaggugcggaaaauccuagaccucguacagagcaagggggaagagguguccgaauuuuuccuguaucuucugcaacaguuggccgaugcguacgucgaccuccgccccuggcugcuggagauuggauuuucuccuucgcucuuaacgcagucaaaagugguugugaacaccgauccagucagccgauauacacagcaacugcgucaccaucuugguagagacaguaaguucguguuguguuacgcucagaaggaggaacugcuacucgaggaaaucuauauggauacuauaauggagcugguaggcuuuuccaaugaaucucuugggagccugaacuccuuggccugccuccuggaccacaccacaggaaucuuaaaugagcagggcgagaccauuuucauccugggugaugcagggguuggaaaaucaaugcuccuucagaggcugcaaaguuugugggccacuggccggcuagacgcuggcgugaaguuuuucuuucacuuccgcuguagaauguuuagcugcuucaaagaaucugauaggcugugucuccaggaccugcuuuuuaagcauuacugcuaucccgagcgggacccugaagaggucuucgcauuccuguugcgcuuuccacacguggcccucuucacauuugaugggcuggacgaauuacauuccgaucuggaccuaucacgagugcccgauagcaguuguccuugggagccagcucacccgcucguccugcuugccaacuugcugucuggaaaacuccugaagggugcguccaaacuucugaccgcaagaacgggcauugagguucccaggcaguucuugcggaagaaggugcuccugcguggguuuagcccuucgcacuuacgcgccuacgcuagaaggauguucccagaacgggcccugcaagaccgacuacucucucagcuggaggcaaaucccaaccuuugcuccuuguguucaguaccucuguuuugcuggaucauauuccgcugcuuucagcauuucagagcugccuuugaaggaaguccacagcuccccgauuguacuaugacccugacagacguguucuuacuggucacugaggugcaccuuaauaggaugcaaccgagcuccuugguucagcggaacacccgcucuccuguggaaacacuccaugcgggcagagauacccugugcagccuaggucaggucgcccacagggggauggagaaaucacuguuuguguucacgcaggaggaaguacaagcaaguggacuccaggagcgugacaugcagcugggcuuccuucgggcuuugcccgaacugggcccagggggagaucagcaauccuacgaguuuuuccauuuaacucuccaggccuuuuucacagccuuuuuccugguucuugacgaccgaguggguacccaggagcuguugagauuuuuccaggaauggaugccucccgcuggcgcagccacuacaagcuguuauccacccuuucucccuuuccaaugccugcaggggucuggaccagcuagggaggaucuauuuaagaauaaagaccacuuccaguuuaccaaccuguuccucuguggccugcuuucaaaggcgaaacaaaaguugcugcgccacuuagucccggcagccgcucuccggagaaagaggaaagcccugugggcacaucuuuucaguagccugcgcgguuaccuaaagucccucccccgagugcaggucgaaucuuuuaaucaggugcaggccaugccuacguucauuuggaugcugcggugcaucuaugagacccaaucgcagaaaguugggcaguuggcugcccguggcauuugugcaaacuaccugaaguuaacauauugcaacgcguguagcgcugauugcuccgcccucucauuugugcugcaccauuucccaaaaagacuugcacuggacuuggauaauaacaaucucaacgacuacggaguaagggaacugcagcccuguuuuagucgccuaacuguccugcggcuuucugugaaucaaaucaccgauggcgggguuaaggugcucagcgaggagcugacaaaguauaaaaucgucacuuacuugggacuguggaaguccguggacaccauuugcuucaaaaagcaggguuuacucaaauga

SEQ ID NO: 9149 - RNA, 2340 nt, Artificial Sequence
  derived and/or modified sequence opt4 from NOD1__Homo_sapiens__EAW93948
auggaggagcagggccacagcgagauggagaucauccccagcgagagccacccccacauccagcugcugaagagcaacagagagcugcuggugacccacaucagaaacacccagugccugguggacaaccugcugaagaacgacuacuucagcgccgaggacgccgagaucgugugcgccugccccacccagcccgacaaggugagaaagauccuggaccuggugcagagcaagggcgaggaggugagcgaguucuuccuguaccugcugcagcagcuggccgacgccuacguggaccugagacccuggcugcuggagaucggcuucagccccagccugcugacccagagcaaggugguggugaacaccgaccccgugagcagauacacccagcagcugagacaccaccugggcagagacagcaaguucgugcugugcuacgcccagaaggaggagcugcugcuggaggagaucuacauggacaccaucauggagcuggugggcuucagcaacgagagccugggcagccugaacagccuggccugccugcuggaccacaccaccggcauccugaacgagcagggcgagaccaucuucauccugggcgacgccggcgugggcaagagcaugcugcugcagagacugcagagccugugggccaccggcagacuggacgccggcgugaaguucuucuuccacuucagaugcagaauguucagcugcuucaaggagagcgacagacugugccugcaggaccugcuguucaagcacuacugcuaccccgagagagaccccgaggagguguucgccuuccugcugagauucccccacguggcccuguucaccuucgacggccuggacgagcugcacagcgaccuggaccugagcagagugcccgacagcagcugccccugggagcccgcccacccccuggugcugcuggccaaccugcugagcggcaagcugcugaagggcgccagcaagcugcugaccgccagaaccggcaucgaggugcccagacaguuccugagaaagaaggugcugcugagaggcuucagccccagccaccugagagccuacgccagaagaauguuccccgagagagcccugcaggacagacugcugagccagcuggaggccaaccccaaccugugcagccugugcagcgugccccuguucugcuggaucaucuucagaugcuuccagcacuucagagccgccuucgagggcagcccccagcugcccgacugcaccaugacccugaccgacguguuccugcuggugaccgaggugcaccugaacagaaugcagcccagcagccuggugcagagaaacaccagaagccccguggagacccugcacgccggcagagacacccugugcagccugggccagguggcccacagaggcauggagaagagccuguucguguucacccaggaggaggugcaggccagcggccugcaggagagagacaugcagcugggcuuccugagagcccugcccgagcugggccccggcggcgaccagcagagcuacgaguucuuccaccugacccugcaggccuucuucaccgccuucuuccuggugcuggacgacagagugggcacccaggagcugcugagauucuuccaggaguggaugccccccgccggcgccgccaccaccagcugcuacccccccuuccugcccuuccagugccugcagggcagcggccccgccagagaggaccuguucaagaacaaggaccacuuccaguucaccaaccuguuccugugcggccugcugagcaaggccaagcagaagcugcugagacaccuggugcccgccgccgcccugagaagaaagagaaaggcccugugggcccaccuguucagcagccugagaggcuaccugaagagccugcccagagugcagguggagagcuucaaccaggugcaggccaugcccaccuucaucuggaugcugagaugcaucuacgagacccagagccagaaggugggccagcuggccgccagaggcaucugcgccaacuaccugaagcugaccuacugcaacgccugcagcgccgacugcagcgcccugagcuucgugcugcaccacuuccccaagagacuggcccuggaccuggacaacaacaaccugaacgacuacggcgugagagagcugcagcccugcuucagcagacugaccgugcugagacugagcgugaaccagaucaccgacggcggcgugaaggugcugagcgaggagcugaccaaguacaagaucgugaccuaccugggccuguggaagagcguggacaccaucugcuucaagaagcagggccugcugaaguga

SEQ ID NO: 9150 - RNA, 2340 nt, Artificial Sequence
  derived and/or modified sequence opt5 from NOD1__Homo_sapiens__EAW93948
auggaggaacagggccacagcgagauggaaaucauucccuccgagucucauccucacauccaacugcucaagagcaacagagaacugcuugugacccauauucggaauacacagugccuggucgacaaccuccugaaaaaugauuacuucuccgccgaggacgcugagaucguuugugccugcccgacgcagcccgauaaggugcgcaaaauucuugaccuggugcagucuaagggggaagaggucagcgaauuuuuccucuaucugcugcaacagcucgcggaugcuuacguggaccugagaccuuggcuucuggagaucggauuuucccccucucuccugacccagagcaaaguuguggucaacacagauccugugucccgguauacccagcaacuucgccaccaucugggcagagacagcaaguucguucucuguuacgcccagaaggaggaacugcugcucgaggaaaucuauauggauacaauuauggagcuggugggguuuucuaaugaaucccuuggaagccugaacucucucgccugccugcuugaccacaccacaggcauccugaaugagcagggggagaccauuuucauccucggagaugcuggcgucggcaaauccaugcugcugcagcggcuccaaagccugugggccacggggcgccuugacgcuggagugaaguuuuucuuucacuucagaugucggauguuuucuugcuucaaagaauccgaucgccugugucuccaggaccugcuuuuuaagcauuacugcuaucccgagagagacccugaagagguguucgccuuccugcuccgguuuccgcacgucgcgcuguucaccuuugauggccuggacgaacuccauagcgaucuggaccuuucccgcguucccgauucuagcuguccuugggagcccgcccacccucuggugcuccuggcuaaccugcuuuccgggaaacuccugaagggagccagcaagcugcucacagcuagaaccggcauugaggugccccggcaguuccugcgcaaaaagguccuucugagaggguuuucuccgucccaccuccgggccuacgcgagacgcauguucccugaacgggcccugcaagacagacugcuuagccagcucgaggcuaaucccaaccugugcucucuguguagcgugccucucuuuugcuggaucauuuuccgcugcuuucagcauuuccgggccgcuuuugaaggaucuccccagcugcccgauuguacaaugacccuuacggacguuuuccugcucgugacagagguccaccugaauagaaugcaaccuuccagccuggugcagcgcaacacccgguccccgguugaaacacuucaugccggcagagauacccucugcagccugggccagguggcccaccgcgggauggagaaaucucuguuugucuucacccaggaggaagugcaggcuuccggacuccaagagcgggacaugcagcugggcuuccuuagagcgcugcccgaacucgggccuggaggcgaucagcaaagcuacgaguuuuuccaucugacacugcaggccuuuuucacggccuuuuuccuuguccucgacgaccgcguggggacccaggagcugcugcgguuuuuccaggaauggaugcccccugcuggagccgcuacaaccucuuguuaucccccguuucucccuuuccaaugccugcagggcuccggccccgccagagaggaucuuuuuaagaauaaagaccacuuccaguuuacaaaccuguuccucugugggcugcugagcaaggcgaaacaaaagcugcugcggcaccucguuccugcugccgcccugcgcagaaagcggaaagcucucugggcccaucuguucuccucucuuagaggauaccuuaagagccucccccgcgugcaggucgaauccuuuaaucaggugcaggcuaugccuaccuucaucuggaugcugcggugcaucuaugagacgcaaucucagaaaguuggccagcuggccgcgagagggauuugugccaacuaccuuaagcugacauauugcaacgcuuguagcgccgauugcuccgcucucagcuuugugcugcaccauuuccccaaacgccucgcccuggaccuugauaauaacaaucugaacgacuacggagucagagaacuccagccguguuuuucucggcugaccgugcugcgccuuuccgugaaucaaaucaccgauggcgggguuaagguccugagcgaggagcucacaaaguauaaaauugugaccuaccugggccucuggaagucuguggacacaaucugcuucaaaaagcagggacugcuuaaauga

SEQ ID NO: 9151 - protein, 953 aa, Artificial Sequence
  NOD1__Homo_sapiens__Q9Y239
MEEQGHSEMEIIPSESHPHIQLLKSNRELLVTHIRNTQCLVDNLLKNDYFSAEDAEIVCACPTQPDKVRKILDLVQSKGEEVSEFFLYLLQQLADAYVDLRPWLLEIGFSPSLLTQSKVVVNTDPVSRYTQQLRHHLGRDSKFVLCYAQKEELLLEEIYMDTIMELVGFSNESLGSLNSLACLLDHTTGILNEQGETIFILGDAGVGKSMLLQRLQSLWATGRLDAGVKFFFHFRCRMFSCFKESDRLCLQDLLFKHYCYPERDPEEVFAFLLRFPHVALFTFDGLDELHSDLDLSRVPDSSCPWEPAHPLVLLANLLSGKLLKGASKLLTARTGIEVPRQFLRKKVLLRGFSPSHLRAYARRMFPERALQDRLLSQLEANPNLCSLCSVPLFCWIIFRCFQHFRAAFEGSPQLPDCTMTLTDVFLLVTEVHLNRMQPSSLVQRNTRSPVETLHAGRDTLCSLGQVAHRGMEKSLFVFTQEEVQASGLQERDMQLGFLRALPELGPGGDQQSYEFFHLTLQAFFTAFFLVLDDRVGTQELLRFFQEWMPPAGAATTSCYPPFLPFQCLQGSGPAREDLFKNKDHFQFTNLFLCGLLSKAKQKLLRHLVPAAALRRKRKALWAHLFSSLRGYLKSLPRVQVESFNQVQAMPTFIWMLRCIYETQSQKVGQLAARGICANYLKLTYCNACSADCSALSFVLHHFPKRLALDLDNNNLNDYGVRELQPCFSRLTVLRLSVNQITDGGVKVLSEELTKYKIVTYLGLYNNQITDVGARYVTKILDECKGLTHLKLGKNKITSEGGKYLALAVKNSKSISEVGMWGNQVGDEGAKAFAEALRNHPSLTTLSLASNGISTEGGKSLARALQQNTSLEILWLTQNELNDEVAESLAEMLKVNQTLKHLWLIQNQITAKGTAQLADALQSNTGITEICLNGNLIKPEEAKVYEDEKRIICF

SEQ ID NO: 9152 - RNA, 2862 nt, Artificial Sequence
  NOD1__Homo_sapiens__AAD28350
auggaagagcagggccacagugagauggaaauaaucccaucagagucucacccccacauucaauuacugaaaagcaaucgggaacuucuggucacucacauccgcaauacucagugucugguggacaacuugcugaagaaugacuacuucucggccgaagaugcggagauugugugugccugccccacccagccugacaagguccgcaaaauucuggaccugguacagagcaagggcgaggagguguccgaguucuuccucuacuugcuccagcaacucgcagaugccuacguggaccucaggccuuggcugcuggagaucggcuucuccccuucccugcucacucagagcaaagucguggucaacacugacccagugagcagguauacccagcagcugcgacaccaucugggccgugacuccaaguucgugcugugcuaugcccagaaggaggagcugcugcuggaggagaucuacauggacaccaucauggagcugguuggcuucagcaaugagagccugggcagccugaacagccuggccugccuccuggaccacaccaccggcauccucaaugagcagggugagaccaucuucauccugggugaugcuggggugggcaaguccaugcugcuacagcggcugcagagccucugggccacgggccggcuagacgcaggggucaaauucuucuuccacuuucgcugccgcauguucagcugcuucaaggaaagugacaggcugugucugcaggaccugcucuucaagcacuacugcuacccagagcgggaccccgaggagguguuugccuuccugcugcgcuucccccacguggcccucuucaccuucgauggccuggacgagcugcacucggacuuggaccugagccgcgugccugacagcuccugccccugggagccugcccacccccuggucuugcuggccaaccugcucagugggaagcugcucaagggggcuagcaagcugcucacagcccgcacaggcaucgaggucccgcgccaguuccugcggaagaaggugcuucuccggggcuucucccccagccaccugcgcgccuaugccaggaggauguuccccgagcgggcccugcaggaccgccugcugagccagcuggaggccaaccccaaccucugcagccugugcucugugccccucuucugcuggaucaucuuccggugcuuccagcacuuccgugcugccuuugaaggcucaccacagcugcccgacugcacgaugacccugacagaugucuuccuccuggucacugagguccaucugaacaggaugcagcccagcagccuggugcagcggaacacacgcagcccaguggagacccuccacgccggccgggacacucugugcucgcuggggcagguggcccaccggggcauggagaagagccucuuugucuucacccaggaggaggugcaggccuccgggcugcaggagagagacaugcagcugggcuuccugcgggcuuugccggagcugggccccgggggugaccagcaguccuaugaguuuuuccaccucacccuccaggccuucuuuacagccuucuuccucgugcuggacgacagggugggcacucaggagcugcucagguucuuccaggaguggaugcccccugcgggggcagcgaccacguccugcuauccucccuuccucccguuccagugccugcagggcagugguccggcgcgggaagaccucuucaagaacaaggaucacuuccaguucaccaaccucuuccugugcgggcuguuguccaaagccaaacagaaacuccugcggcaucuggugcccgcggcagcccugaggagaaagcgcaaggcccugugggcacaccuguuuuccagccugcggggcuaccugaagagccugccccgcguucaggucgaaagcuucaaccaggugcaggccaugcccacguucaucuggaugcugcgcugcaucuacgagacacagagccagaagguggggcagcuggcggccaggggcaucugcgccaacuaccucaagcugaccuacugcaacgccugcucggccgacugcagcgcccucuccuucguccugcaucacuuccccaagcggcuggcccuagaccuagacaacaacaaucucaacgacuacggcgugcgggagcugcagcccugcuucagccgccucacuguucucagacucagcguaaaccagaucacugacggugggguaaaggugcuaagcgaagagcugaccaaauacaaaauugugaccuauuuggguuuauacaacaaccagaucaccgaugucggagccagguacgucaccaaaauccuggaugaaugcaaaggccucacgcaucuuaaacugggaaaaaacaaaauaacaagugaaggagggaaguaucucgcccuggcugugaagaacagcaaaucaaucucugagguugggauguggggcaaucaaguuggggaugaaggagcaaaagccuucgcagaggcucugcggaaccaccccagcuugaccacccugagucuugcguccaacggcaucuccacagaaggaggaaagagccuugcgagggcccugcagcagaacacgucucuagaaauacuguggcugacccaaaaugaacucaacgaugaaguggcagagaguuuggcagaaauguugaaagucaaccagacguuaaagcauuuauggcuuauccagaaucagaucacagcuaaggggacugcccagcuggcagaugcguuacagagcaacacuggcauaacagagauuugccuaaauggaaaccugauaaaaccagaggaggccaaagucuaugaagaugagaagcggauuaucuguuucuga

SEQ ID NO: 9153 - RNA, 2862 nt, Artificial Sequence
  derived and/or modified sequence opt1 from NOD1__Homo_sapiens__AAD28350
auggaggagcagggccacagcgagauggagaucauccccuccgagagccacccgcacauccagcugcucaaguccaaccgcgagcugcuggugacccacauccggaacacccagugccucgucgacaaccugcugaagaacgacuacuucagcgccgaggacgccgagaucgugugcgcgugccccacgcagcccgacaaggugcgcaagauccucgaccugguccaguccaagggggaggaggugagcgaguucuuccuguaccuccugcagcagcuggccgacgccuacguggaccuccggcccuggcugcuggagaucggcuucuccccgagccuccugacccaguccaaggucguggugaacaccgaccccgucagccgcuacacccagcagcugcggcaccaccucgggcgcgacuccaaguucgugcugugcuacgcccagaaggaggagcugcuccuggaggagaucuacauggacacgaucauggagcuggugggcuucagcaacgagucccucgggagccugaacucccuggccugccuccuggaccacaccaccggcauccugaacgagcagggcgagaccaucuucauccucggggacgcgggcgucggcaagagcaugcugcugcagcggcuccagucccugugggccacggggcgccuggacgccggggugaaguucuucuuccacuuccggugccgcauguucagcugcuucaaggaguccgaccggcucugccugcaggaccugcuguucaagcacuacugcuaccccgagcgcgaccccgaggagguguucgccuuccugcugcgguucccgcacgucgcgcuguucaccuucgacggccuggacgagcugcacagcgaccucgaccugagccgcgugcccgacuccagcugccccugggagcccgcccacccgcuggugcuccuggccaaccugcuguccggcaagcuccugaagggggccagcaagcugcucaccgcccggaccggcaucgaggucccccgccaguuccugcggaagaaggugcugcuccgcggguucucccccagccaccuccgggcguacgcccgccggauguuccccgagcgcgcccugcaggaccgccuccugucccagcuggaggccaacccgaaccucugcagccugugcuccgugccccuguucugcuggaucaucuuccggugcuuccagcacuuccgcgccgcguucgagggcagcccccagcuccccgacugcacgaugacccugaccgacgucuuccugcucgugaccgaggugcaccugaaccggaugcagccguccagccugguccagcgcaacacgcggucccccguggagacccuccacgccggccgcgacacccugugcagccuggggcaggucgcccaccggggcauggagaagucccucuucguguucacccaggaggaggugcaggccagcgggcugcaggagcgcgacaugcagcugggcuuccuccgggcccugcccgagcuggggcccggcggcgaccagcaguccuacgaguucuuccaccucacgcugcaggcguucuucaccgccuucuuccugguccucgacgaccgcguggggacccaggagcugcugcgguucuuccaggaguggaugccgcccgccggcgccgccaccacgagcugcuacccgcccuuccuccccuuccagugccugcagggguccggccccgcgcgcgaggaccuguucaagaacaaggaccacuuccaguucaccaaccucuuccugugcgggcugcucagcaaggccaagcagaagcugcugcggcaccucgugcccgccgccgcgcugcgccggaagcgcaaggcccugugggcccaccucuucagcucccugcggggcuaccucaagagccucccgcgcguccagguggaguccuucaaccaggugcaggccaugcccaccuucaucuggaugcugcggugcaucuacgagacccagagccagaaggucggccagcuggccgcgcgcgggaucugcgccaacuaccucaagcugacguacugcaacgccugcuccgccgacugcagcgcccuguccuucgugcuccaccacuuccccaagcgccuggcgcuggaccucgacaacaacaaccugaacgacuacggcgugcgggagcugcagcccugcuucagccgccucaccguccugcggcuguccgugaaccagaucaccgacgggggcgugaagguccucagcgaggagcugaccaaguacaagaucgugacguaccuggggcucuacaacaaccagaucaccgacgugggcgcccgcuacgucaccaagauccuggacgagugcaagggccugacccaccucaagcuggggaagaacaagaucacguccgagggcgggaaguaccuggcccucgccgugaagaacagcaaguccaucagcgaggugggcauguggggcaaccaggucggggacgagggcgccaaggcguucgccgaggcccugcggaaccacccgucccugaccacccucagccuggccuccaacgggaucagcaccgagggcggcaagagccuggcgcgcgcccuccagcagaacaccucccuggagauccuguggcucacgcagaacgagcugaacgacgagguggccgagagccuggccgagaugcucaaggugaaccagacccugaagcaccuguggcucauccagaaccagaucaccgccaaggggaccgcgcagcuggccgacgcccugcaguccaacacgggcaucaccgagaucugccucaacgggaaccugaucaagcccgaggaggccaaggucuacgaggacgagaagcggaucaucugcuucuga

SEQ ID NO: 9154 - RNA, 2862 nt, Artificial Sequence
  derived and/or modified sequence opt2 from NOD1__Homo_sapiens__AAD28350
auggaggagcagggccacuccgagauggagaucauccccuccgagucccacccccacauccagcuccucaaguccaaccgcgagcuccucgucacccacauccgcaacacccagugccucgucgacaaccuccucaagaacgacuacuucuccgccgaggacgccgagaucgucugcgccugccccacccagcccgacaagguccgcaagauccucgaccucguccaguccaagggcgaggaggucuccgaguucuuccucuaccuccuccagcagcucgccgacgccuacgucgaccuccgccccuggcuccucgagaucggcuucucccccucccuccucacccaguccaaggucgucgucaacaccgaccccgucucccgcuacacccagcagcuccgccaccaccucggccgcgacuccaaguucguccucugcuacgcccagaaggaggagcuccuccucgaggagaucuacauggacaccaucauggagcucgucggcuucuccaacgagucccucggcucccucaacucccucgccugccuccucgaccacaccaccggcauccucaacgagcagggcgagaccaucuucauccucggcgacgccggcgucggcaaguccaugcuccuccagcgccuccagucccucugggccaccggccgccucgacgccggcgucaaguucuucuuccacuuccgcugccgcauguucuccugcuucaaggaguccgaccgccucugccuccaggaccuccucuucaagcacuacugcuaccccgagcgcgaccccgaggaggucuucgccuuccuccuccgcuucccccacgucgcccucuucaccuucgacggccucgacgagcuccacuccgaccucgaccucucccgcguccccgacuccuccugccccugggagcccgcccacccccucguccuccucgccaaccuccucuccggcaagcuccucaagggcgccuccaagcuccucaccgcccgcaccggcaucgaggucccccgccaguuccuccgcaagaagguccuccuccgcggcuucucccccucccaccuccgcgccuacgcccgccgcauguuccccgagcgcgcccuccaggaccgccuccucucccagcucgaggccaaccccaaccucugcucccucugcuccgucccccucuucugcuggaucaucuuccgcugcuuccagcacuuccgcgccgccuucgagggcuccccccagcuccccgacugcaccaugacccucaccgacgucuuccuccucgucaccgagguccaccucaaccgcaugcagcccuccucccucguccagcgcaacacccgcucccccgucgagacccuccacgccggccgcgacacccucugcucccucggccaggucgcccaccgcggcauggagaagucccucuucgucuucacccaggaggagguccaggccuccggccuccaggagcgcgacaugcagcucggcuuccuccgcgcccuccccgagcucggccccggcggcgaccagcaguccuacgaguucuuccaccucacccuccaggccuucuucaccgccuucuuccucguccucgacgaccgcgucggcacccaggagcuccuccgcuucuuccaggaguggaugccccccgccggcgccgccaccaccuccugcuacccccccuuccuccccuuccagugccuccagggcuccggccccgcccgcgaggaccucuucaagaacaaggaccacuuccaguucaccaaccucuuccucugcggccuccucuccaaggccaagcagaagcuccuccgccaccucguccccgccgccgcccuccgccgcaagcgcaaggcccucugggcccaccucuucuccucccuccgcggcuaccucaagucccucccccgcguccaggucgaguccuucaaccagguccaggccaugcccaccuucaucuggaugcuccgcugcaucuacgagacccagucccagaaggucggccagcucgccgcccgcggcaucugcgccaacuaccucaagcucaccuacugcaacgccugcuccgccgacugcuccgcccucuccuucguccuccaccacuuccccaagcgccucgcccucgaccucgacaacaacaaccucaacgacuacggcguccgcgagcuccagcccugcuucucccgccucaccguccuccgccucuccgucaaccagaucaccgacggcggcgucaagguccucuccgaggagcucaccaaguacaagaucgucaccuaccucggccucuacaacaaccagaucaccgacgucggcgcccgcuacgucaccaagauccucgacgagugcaagggccucacccaccucaagcucggcaagaacaagaucaccuccgagggcggcaaguaccucgcccucgccgucaagaacuccaaguccaucuccgaggucggcauguggggcaaccaggucggcgacgagggcgccaaggccuucgccgaggcccuccgcaaccaccccucccucaccacccucucccucgccuccaacggcaucuccaccgagggcggcaagucccucgcccgcgcccuccagcagaacaccucccucgagauccucuggcucacccagaacgagcucaacgacgaggucgccgagucccucgccgagaugcucaaggucaaccagacccucaagcaccucuggcucauccagaaccagaucaccgccaagggcaccgcccagcucgccgacgcccuccaguccaacaccggcaucaccgagaucugccucaacggcaaccucaucaagcccgaggaggccaaggucuacgaggacgagaagcgcaucaucugcuucuga

SEQ ID NO: 9155 - RNA, 2862 nt, Artificial Sequence
  derived and/or modified sequence opt3 from NOD1__Homo_sapiens__AAD28350
auggaggaacagggccacagcgagauggaaaucauucccuccgagucucauccucacauacaacugcucaagucaaacagagaacuucuggugacccauaucaggaauacacagugcuuggucgacaacuuacugaaaaaugauuacuucagugccgaggacgcugagauuguuugugcaugcccaacucagccggauaaggugcggaaaauccuagaccucguacagagcaagggggaagagguguccgaauuuuuccuguaucuucugcaacaguuggccgaugcguacgucgaccuccgccccuggcugcuggagauuggauuuucuccuucgcucuuaacgcagucaaaagugguugugaacaccgauccagucagccgauauacacagcaacugcgucaccaucuugguagagacaguaaguucguguuguguuacgcucagaaggaggaacugcuacucgaggaaaucuauauggauacuauaauggagcugguaggcuuuuccaaugaaucucuugggagccugaacuccuuggccugccuccuggaccacaccacaggaaucuuaaaugagcagggcgagaccauuuucauccugggugaugcagggguuggaaaaucaaugcuccuucagaggcugcaaaguuugugggccacuggccggcuagacgcuggcgugaaguuuuucuuucacuuccgcuguagaauguuuagcugcuucaaagaaucugauaggcugugucuccaggaccugcuuuuuaagcauuacugcuaucccgagcgggacccugaagaggucuucgcauuccuguugcgcuuuccacacguggcccucuucacauuugaugggcuggacgaauuacauuccgaucuggaccuaucacgagugcccgauagcaguuguccuugggagccagcucacccgcucguccugcuugccaacuugcugucuggaaaacuccugaagggugcguccaaacuucugaccgcaagaacgggcauugagguucccaggcaguucuugcggaaaaaggugcuccugcguggguuuagcccuucgcacuuacgcgccuacgcuagaaggauguucccagaacgggcccugcaagaccgacuacucucucagcuggaggcaaaucccaaccuuugcuccuuguguucaguaccucuguuuugcuggaucauauuccgcugcuuucagcauuucagagcugccuuugaaggaaguccacagcuccccgauuguacuaugacccugacagacguguucuuacuggucacugaggugcaccuuaauaggaugcaaccgagcuccuugguucagcggaacacccgcucuccuguggaaacacuccaugcgggcagagauacccugugcagccuaggucaggucgcccacagggggauggagaaaucacuguuuguguucacgcaggaggaaguacaagcaaguggacuccaggagcgugacaugcagcugggcuuccuucgggcuuugcccgaacugggcccagggggagaucagcaauccuacgaguuuuuccauuuaacucuccaggccuuuuucacagccuuuuuccugguucuugacgaccgaguggguacccaggagcuguugagauuuuuccaggaauggaugccucccgcuggcgcagccacuacaagcuguuauccacccuuucucccuuuccaaugccugcaggggucuggaccagcuagggaggaucuauuuaagaauaaagaccacuuccaguuuaccaaccuguuccucuguggccugcuuucaaaggcgaaacaaaaguugcugcgccacuuagucccggcagccgcucuccggagaaagaggaaagcccugugggcacaucuuuucaguagccugcgcgguuaccuaaagucccucccccgagugcaggucgaaucuuuuaaucaggugcaggccaugccuacguucauuuggaugcugcggugcaucuaugagacccaaucgcagaaaguugggcaguuggcugcccguggcauuugugcaaacuaccugaaguuaacauauugcaacgcguguagcgcugauugcuccgcccucucauuugugcugcaccauuucccaaaaagacuugcacuggacuuggauaauaacaaucucaacgacuacggaguaagggaacugcagcccuguuuuagucgccuaacuguccugcggcuuucugugaaucaaaucaccgauggcgggguuaaggugcucagcgaggagcugacaaaguauaaaaucgucacuuacuugggacuguacaacaaucagauuaccgacgugggugccagauauguaacaaagauauuagaugaaugcaaaggccucacccaccugaaacuugggaagaacaagaucacuuccgagggaggcaaguaccuggcuuuggccgugaaaaauucaaagagcauuucugaaguugguaugugggggaaccaggucggcgacgagggagcaaaggcuuucgccgaagcgcucaggaaucacccuucccugacgacacuaagucuggccagcaacggcaucucuaccgaagggggaaagucccuugcucgagcacuccagcaaaauacuucacuggagauauugugguuaacccagaacgagcugaaugaugagguggccgaaagucucgcugagaugcugaaagugaaccagacacuuaagcaucugugguugauucaaaaccagaucaccgccaaggguacugcacagcuagcggacgcccugcagagcaauacaggcaucacggaaauuugccucaacgggaaucugaucaaaccagaggaggcuaaggucuaugaagaugagaaacgcauuauauguuuuuga

SEQ ID NO: 9156 - RNA, 2862 nt, Artificial Sequence
  derived and/or modified sequence opt4 from NOD1__Homo_sapiens__AAD28350
auggaggagcagggccacagcgagauggagaucauccccagcgagagccacccccacauccagcugcugaagagcaacagagagcugcuggugacccacaucagaaacacccagugccugguggacaaccugcugaagaacgacuacuucagcgccgaggacgccgagaucgugugcgccugccccacccagcccgacaaggugagaaagauccuggaccuggugcagagcaagggcgaggaggugagcgaguucuuccuguaccugcugcagcagcuggccgacgccuacguggaccugagacccuggcugcuggagaucggcuucagccccagccugcugacccagagcaaggugguggugaacaccgaccccgugagcagauacacccagcagcugagacaccaccugggcagagacagcaaguucgugcugugcuacgcccagaaggaggagcugcugcuggaggagaucuacauggacaccaucauggagcuggugggcuucagcaacgagagccugggcagccugaacagccuggccugccugcuggaccacaccaccggcauccugaacgagcagggcgagaccaucuucauccugggcgacgccggcgugggcaagagcaugcugcugcagagacugcagagccugugggccaccggcagacuggacgccggcgugaaguucuucuuccacuucagaugcagaauguucagcugcuucaaggagagcgacagacugugccugcaggaccugcuguucaagcacuacugcuaccccgagagagaccccgaggagguguucgccuuccugcugagauucccccacguggcccuguucaccuucgacggccuggacgagcugcacagcgaccuggaccugagcagagugcccgacagcagcugccccugggagcccgcccacccccuggugcugcuggccaaccugcugagcggcaagcugcugaagggcgccagcaagcugcugaccgccagaaccggcaucgaggugcccagacaguuccugagaaagaaggugcugcugagaggcuucagccccagccaccugagagccuacgccagaagaauguuccccgagagagcccugcaggacagacugcugagccagcuggaggccaaccccaaccugugcagccugugcagcgugccccuguucugcuggaucaucuucagaugcuuccagcacuucagagccgccuucgagggcagcccccagcugcccgacugcaccaugacccugaccgacguguuccugcuggugaccgaggugcaccugaacagaaugcagcccagcagccuggugcagagaaacaccagaagccccguggagacccugcacgccggcagagacacccugugcagccugggccagguggcccacagaggcauggagaagagccuguucguguucacccaggaggaggugcaggccagcggccugcaggagagagacaugcagcugggcuuccugagagcccugcccgagcugggccccggcggcgaccagcagagcuacgaguucuuccaccugacccugcaggccuucuucaccgccuucuuccuggugcuggacgacagagugggcacccaggagcugcugagauucuuccaggaguggaugccccccgccggcgccgccaccaccagcugcuacccccccuuccugcccuuccagugccugcagggcagcggccccgccagagaggaccuguucaagaacaaggaccacuuccaguucaccaaccuguuccugugcggccugcugagcaaggccaagcagaagcugcugagacaccuggugcccgccgccgcccugagaagaaagagaaaggcccugugggcccaccuguucagcagccugagaggcuaccugaagagccugcccagagugcagguggagagcuucaaccaggugcaggccaugcccaccuucaucuggaugcugagaugcaucuacgagacccagagccagaaggugggccagcuggccgccagaggcaucugcgccaacuaccugaagcugaccuacugcaacgccugcagcgccgacugcagcgcccugagcuucgugcugcaccacuuccccaagagacuggcccuggaccuggacaacaacaaccugaacgacuacggcgugagagagcugcagcccugcuucagcagacugaccgugcugagacugagcgugaaccagaucaccgacggcggcgugaaggugcugagcgaggagcugaccaaguacaagaucgugaccuaccugggccuguacaacaaccagaucaccgacgugggcgccagauacgugaccaagauccuggacgagugcaagggccugacccaccugaagcugggcaagaacaagaucaccagcgagggcggcaaguaccuggcccuggccgugaagaacagcaagagcaucagcgaggugggcauguggggcaaccaggugggcgacgagggcgccaaggccuucgccgaggcccugagaaaccaccccagccugaccacccugagccuggccagcaacggcaucagcaccgagggcggcaagagccuggccagagcccugcagcagaacaccagccuggagauccuguggcugacccagaacgagcugaacgacgagguggccgagagccuggccgagaugcugaaggugaaccagacccugaagcaccuguggcugauccagaaccagaucaccgccaagggcaccgcccagcuggccgacgcccugcagagcaacaccggcaucaccgagaucugccugaacggcaaccugaucaagcccgaggaggccaagguguacgaggacgagaagagaaucaucugcuucuga

SEQ ID NO: 9157 - RNA, 2862 nt, Artificial Sequence
  derived and/or modified sequence opt5 from NOD1__Homo_sapiens__AAD28350
auggaggaacagggccacagcgagauggaaaucauucccuccgagucucauccucacauccaacugcucaagagcaacagagaacugcuugugacccauauucggaauacacagugccuggucgacaaccuccugaaaaaugauuacuucuccgccgaggacgcugagaucguuugugccugcccgacgcagcccgauaaggugcgcaaaauucuugaccuggugcagucuaagggggaagaggucagcgaauuuuuccucuaucugcugcaacagcucgcggaugcuuacguggaccugagaccuuggcuucuggagaucggauuuucccccucucuccugacccagagcaaaguuguggucaacacagauccugugucccgguauacccagcaacuucgccaccaucugggcagagacagcaaguucguucucuguuacgcccagaaggaggaacugcugcucgaggaaaucuauauggauacaauuauggagcuggugggguuuucuaaugaaucccuuggaagccugaacucucucgccugccugcuugaccacaccacaggcauccugaaugagcagggggagaccauuuucauccucggagaugcuggcgucggcaaauccaugcugcugcagcggcuccaaagccugugggccacggggcgccuugacgcuggagugaaguuuuucuuucacuucagaugucggauguuuucuugcuucaaagaauccgaucgccugugucuccaggaccugcuuuuuaagcauuacugcuaucccgagagagacccugaagagguguucgccuuccugcuccgguuuccgcacgucgcgcuguucaccuuugauggccuggacgaacuccauagcgaucuggaccuuucccgcguucccgauucuagcuguccuugggagcccgcccacccucuggugcuccuggcuaaccugcuuuccgggaaacuccugaagggagccagcaagcugcucacagcuagaaccggcauugaggugccccggcaguuccugcgcaaaaagguccuucugagaggguuuucuccgucccaccuccgggccuacgcgagacgcauguucccugaacgggcccugcaagacagacugcuuagccagcucgaggcuaaucccaaccugugcucucuguguagcgugccucucuuuugcuggaucauuuuccgcugcuuucagcauuuccgggccgcuuuugaaggaagcccccagcugcccgauuguacaaugacccuuacggacguuuuccugcucgugacagagguccaccugaauagaaugcaaccuucuagccuggugcagcgcaacacccgguccccgguugaaacacuucaugccggcagagauacccucugcagccugggccagguggcccaccgcgggauggagaaaucucuguuugucuucacccaggaggaagugcaggcuuccggacuccaagagcgggacaugcagcugggcuuccuuagagcgcugcccgaacucgggccuggaggcgaucagcaaagcuacgaguuuuuccaucugacacugcaggccuuuuucacggccuuuuuccuuguccucgacgaccgcguggggacccaggagcugcugcgguuuuuccaggaauggaugcccccugcuggagccgcuacaaccucuuguuaucccccguuucucccuuuccaaugccugcagggcuccggccccgccagagaggaucuuuuuaagaauaaagaccacuuccaguuuacaaaccuguuccucugugggcugcugagcaaggcgaaacaaaaacuucugcggcaccucguuccugcugccgcccugcgcagaaagcggaaagcucucugggcccaucuguucuccucucuuagaggauaccugaagucccucccccgcgugcaggucgaauccuuuaaucaggugcaggcuaugccuaccuucaucuggaugcugcggugcaucuaugagacgcaaucucagaaaguuggccagcuggccgcgagagggauuugugccaacuaccuuaagcugacauauugcaacgcuuguagcgccgauugcuccgcucucagcuuugugcugcaccauuuccccaaacgccucgcccuggaccuugauaauaacaaucugaacgacuacggagucagagaacuccagccguguuuuucucggcugaccgugcugcgccuuuccgugaaucaaaucaccgauggcgggguuaagguccugagcgaggagcucacaaaguauaaaauugugaccuaccugggccucuacaacaaucagaucacagacgugggagcgagauaugucacgaagauucuggaugaaugcaaaggccuuacccaccugaagcuggggaaaaacaagaucacaucugagggaggcaaguaccucgcccuggcugugaaaaauuccaagagcaucucugaaguugggauguggggaaaccaggugggcgacgagggggccaaggcuuucgccgaagcccuucggaaucacccuagccugaccacacucucccuggcuagcaacggcauuucuaccgagggaggcaagucccucgcgcgcgcccugcagcaaaauacgagccuugagauccuguggcugacccagaacgaacucaaugaugaggucgcugaaucccuggccgagaugcuuaaagugaaccagacacugaagcaucucuggcugauucaaaaccagaucaccgccaaggggacagcucagcucgccgacgcgcugcagucuaauaccggaauuacggaaaucugccuuaacggcaaucugaucaaacccgaggaggcuaagguuuaugaagaugagaaaagaauuaucuguuuuuga

SEQ ID NO: 9158 - protein, 1040 aa, Artificial Sequence
  NOD2__Homo_sapiens__Q9HC29
MGEEGGSASHDEEERASVLLGHSPGCEMCSQEAFQAQRSQLVELLVSGSLEGFESVLDWLLSWEVLSWEDYEGFHLLGQPLSHLARRLLDTVWNKGTWACQKLIAAAQEAQADSQSPKLHGCWDPHSLHPARDLQSHRPAIVRRLHSHVENMLDLAWERGFVSQYECDEIRLPIFTPSQRARRLLDLATVKANGLAAFLLQHVQELPVPLALPLEAATCKKYMAKLRTTVSAQSRFLSTYDGAETLCLEDIYTENVLEVWADVGMAGPPQKSPATLGLEELFSTPGHLNDDADTVLVVGEAGSGKSTLLQRLHLLWAAGQDFQEFLFVFPFSCRQLQCMAKPLSVRTLLFEHCCWPDVGQEDIFQLLLDHPDRVLLTFDGFDEFKFRFTDRERHCSPTDPTSVQTLLFNLLQGNLLKNARKVVTSRPAAVSAFLRKYIRTEFNLKGFSEQGIELYLRKRHHEPGVADRLIRLLQETSALHGLCHLPVFSWMVSKCHQELLLQEGGSPKTTTDMYLLILQHFLLHATPPDSASQGLGPSLLRGRLPTLLHLGRLALWGLGMCCYVFSAQQLQAAQVSPDDISLGFLVRAKGVVPGSTAPLEFLHITFQCFFAAFYLALSADVPPALLRHLFNCGRPGNSPMARLLPTMCIQASEGKDSSVAALLQKAEPHNLQITAAFLAGLLSREHWGLLAECQTSEKALLRRQACARWCLARSLRKHFHSIPPAAPGEAKSVHAMPGFIWLIRSLYEMQEERLARKAARGLNVGHLKLTFCSVGPTECAALAFVLQHLRRPVALQLDYNSVGDIGVEQLLPCLGVCKALYLRDNNISDRGICKLIECALHCEQLQKLALFNNKLTDGCAHSMAKLLACRQNFLALRLGNNYITAAGAQVLAEGLRGNTSLQFLGFWGNRVGDEGAQALAEALGDHQSLRWLSLVGNNIGSVGAQALALMLAKNVMLEELCLEENHLQDEGVCSLAEGLKKNSSLKILKLSNNCITYLGAEALLQALERNDTILEVWLRGNTFSLEEVDKLGCRDTRLLL

SEQ ID NO: 9159 - RNA, 3123 nt, Artificial Sequence
  NOD2__Homo_sapiens__AAG33677
augggggaagagggugguucagccucucacgaugaggaggaaagagcaaguguccuccucggacauucuccggguugugaaaugugcucgcaggaggcuuuucaggcacagaggagccagcuggucgagcugcuggucucagggucccuggaaggcuucgagaguguccuggacuggcugcuguccugggagguccucuccugggaggacuacgagggcuuccaccuccugggccagccucucucccacuuggccaggcgccuucuggacaccgucuggaauaaggguacuugggccugucagaagcucaucgcggcugcccaagaagcccaggccgacagccagucccccaagcugcauggcugcugggacccccacucgcuccacccagcccgagaccugcagagucaccggccagccauugucaggaggcuccacagccauguggagaacaugcuggaccuggcaugggagcgggguuucgucagccaguaugaaugugaugaaaucagguugccgaucuucacaccgucccagagggcaagaaggcugcuugaucuugccacggugaaagcgaauggauuggcugccuuccuucuacaacauguucaggaauuaccagucccauuggcccugccuuuggaagcugccacaugcaagaaguauauggccaagcugaggaccacggugucugcucagucucgcuuccucaguaccuaugauggagcagagacgcucugccuggaggacauauacacagagaauguccuggaggucugggcagaugugggcauggcuggacccccgcagaagagcccagccacccugggccuggaggagcucuucagcaccccuggccaccucaaugacgaugcggacacugugcugguggugggugaggcgggcaguggcaagagcacgcuccugcagcggcugcacuugcugugggcugcagggcaagacuuccaggaauuucucuuugucuucccauucagcugccggcagcugcagugcauggccaaaccacucucugugcggacucuacucuuugagcacugcuguuggccugauguuggucaagaagacaucuuccaguuacuccuugaccacccugaccguguccuguuaaccuuugauggcuuugacgaguucaaguucagguucacggaucgugaacgccacugcuccccgaccgaccccaccucuguccagacccugcucuucaaccuucugcagggcaaccugcugaagaaugcccgcaagguggugaccagccguccggccgcugugucggcguuccucaggaaguacauccgcaccgaguucaaccucaagggcuucucugaacagggcaucgagcuguaccugaggaagcgccaucaugagcccgggguggcggaccgccucauccgccugcuccaagagaccucagcccugcacgguuugugccaccugccugucuucucauggaugguguccaaaugccaccaggaacuguugcugcaggaggggggguccccaaagaccacuacagauauguaccugcugauucugcagcauuuucugcugcaugccacccccccagacucagcuucccaaggucugggacccagucuucuucggggccgccuccccacccuccugcaccugggcagacuggcucuguggggccugggcaugugcugcuacguguucucagcccagcagcuccaggcagcacaggucagcccugaugacauuucucuuggcuuccuggugcgugccaaaggugucgugccagggaguacggcgccccuggaauuccuucacaucacuuuccagugcuucuuugccgcguucuaccuggcacucagugcugaugugccaccagcuuugcucagacaccucuucaauuguggcaggccaggcaacucaccaauggccaggcuccugcccacgaugugcauccaggccucggagggaaaggacagcagcguggcagcuuugcugcagaaggccgagccgcacaaccuucagaucacagcagccuuccuggcagggcuguugucccgggagcacuggggccugcuggcugagugccagacaucugagaaggcccugcuccggcgccaggccugugcccgcuggugucuggcccgcagccuccgcaagcacuuccacuccaucccgccagcugcaccgggugaggccaagagcgugcaugccaugcccggguucaucuggcucauccggagccuguacgagaugcaggaggagcggcuggcucggaaggcugcacguggccugaauguugggcaccucaaguugacauuuugcagugugggccccacugagugugcugcccuggccuuugugcugcagcaccuccggcggcccguggcccugcagcuggacuacaacucugugggugacauuggcguggagcagcugcugccuugccuuggugucugcaaggcucuguauuugcgcgauaacaauaucucagaccgaggcaucugcaagcucauugaaugugcucuucacugcgagcaauugcagaaguuagcucuauucaacaacaaauugacugacggcugugcacacuccauggcuaagcuccuugcaugcaggcagaacuucuuggcauugaggcuggggaauaacuacaucacugccgcgggagcccaagugcuggccgaggggcuccgaggcaacaccuccuugcaguuccugggauucuggggcaacagagugggugacgagggggcccaggcccuggcugaagccuugggugaucaccagagcuugagguggcucagccugguggggaacaacauuggcagugugggugcccaagccuuggcacugaugcuggcaaagaacgucaugcuagaagaacucugccuggaggagaaccaucuccaggaugaagguguauguucucucgcagaaggacugaagaaaaauucaaguuugaaaauccugaaguuguccaauaacugcaucaccuaccuaggggcagaagcccuccugcaggcccuugaaaggaaugacaccauccuggaagucuggcuccgagggaacacuuucucucuagaggagguugacaagcucggcugcagggacaccagacucuugcuuuga

SEQ ID NO: 9160 - RNA, 3123 nt, Artificial Sequence
  derived and/or modified sequence opt1 from NOD2__Homo_sapiens__AAG33677
augggcgaggagggcgggagcgccucccacgacgaggaggagcgcgccagcgugcugcucgggcacucccccggcugcgagaugugcagccaggaggcguuccaggcccagcggucccagcuggucgagcugcucgugagcgggucccuggagggcuucgagagcgugcuggacuggcuccuguccugggagguccugagcugggaggacuacgagggcuuccaccuccuggggcagccgcugucccaccucgcccgccggcugcuggacaccguguggaacaagggcaccugggccugccagaagcucaucgccgcggcccaggaggcccaggccgacagccagucccccaagcugcacgggugcugggacccccacagccugcaccccgcgcgcgaccuccagucccaccggccggccaucgugcgccggcugcacagccacgucgagaacaugcuggaccucgccugggagcgcggcuucgugucccaguacgagugcgacgagauccggcugcccaucuucacgcccagccagcgcgcccggcgccugcucgaccuggccaccgugaaggcgaacgggcuggccgccuuccuccugcagcacguccaggagcugcccgugccgcucgcccugccccuggaggccgcgaccugcaagaaguacauggccaagcuccggaccacgguguccgcccagagccgcuuccugagcaccuacgacggcgccgagacccugugccucgaggacaucuacaccgagaacguccuggaggugugggccgacgugggcauggcggggccgccccagaagucccccgccacgcugggccucgaggagcuguucagcacccccgggcaccugaacgacgacgccgacaccguccucguggugggcgaggccggcuccggcaagagcacccugcugcagcggcuccaccuccugugggccgcggggcaggacuuccaggaguuccucuucgucuuccccuucuccugccgccagcugcagugcauggccaagccccugagcgugcggacgcugcuguucgagcacugcugcuggccggacguggggcaggaggacaucuuccagcugcugcucgaccaccccgaccgcguccugcugaccuucgacggcuucgacgaguucaaguuccgguucaccgaccgcgagcggcacugcucccccaccgaccccacgagcgugcagacccuccuguucaaccugcuccaggggaaccugcugaagaacgcccgcaagguggucaccucccgcccggccgcggugagcgccuuccuccggaaguacauccgcaccgaguucaaccugaagggcuucuccgagcagggcaucgagcuguaccuccggaagcgccaccacgagcccggggucgccgaccggcugauccgccugcuccaggagacgagcgcccugcacggccugugccaccuccccguguucuccuggauggugagcaagugccaccaggagcugcugcuccaggagggcgggucccccaagaccaccaccgacauguaccugcugauccuccagcacuuccugcugcacgccacgccgcccgacagcgcgucccaggggcucggccccagccugcugcggggccgccuccccacccugcugcaccucgggcggcuggcccuguggggccucgggaugugcugcuacgucuucuccgcccagcagcugcaggccgcccaggugagcccggacgacaucagccugggcuuccucgugcgcgcgaagggggucgugcccggcuccaccgcgccccuggaguuccugcacaucaccuuccagugcuucuucgccgccuucuaccucgcccugagcgcggacgugccgcccgcccugcuccggcaccuguucaacugcggccgccccgggaacucccccauggcccggcugcucccgacgaugugcauccaggccagcgagggcaaggacuccagcgucgcggcccugcugcagaaggccgagccccacaaccuccagaucaccgccgccuuccuggcggggcugcucucccgcgagcacuggggccugcuggccgagugccagaccagcgagaaggcccuccugcggcgccaggccugcgcccgguggugccuggcgcgcucccuccggaagcacuuccacagcaucccgcccgccgcccccggcgaggccaaguccgugcacgccaugcccggguucaucuggcugauccgcagccuguacgagaugcaggaggagcgccucgcgcggaaggccgcccgcggccugaacguggggcaccugaagcucaccuucugcuccgucggccccacggagugcgccgcgcuggccuucgugcugcagcaccuccggcgccccguggcccugcagcuggacuacaacagcgucggggacaucggcguggagcagcuccugccgugccugggcgugugcaaggcccucuaccugcgggacaacaacaucuccgaccgcgggaucugcaagcugaucgagugcgcccuccacugcgagcagcugcagaagcuggcccucuucaacaacaagcugaccgacggcugcgcccacagcauggccaagcugcucgccugccggcagaacuuccuggcccugcgccucgggaacaacuacaucaccgcggccggcgcccagguccuggccgaggggcugcggggcaacaccucccuccaguuccugggcuucugggggaaccgcgugggcgacgagggggcccaggcgcuggccgaggcccugggcgaccaccagagccuccgguggcugagccugguggggaacaacaucggcuccgucggcgcccaggcccucgcgcugaugcuggccaagaacgugaugcucgaggagcugugccuggaggagaaccaccuccaggacgagggggugugcagccuggccgagggccugaagaagaacuccagccucaagauccugaagcuguccaacaacugcaucacguaccucggggccgaggcgcugcugcaggcccucgagcgcaacgacaccauccuggaggucuggcugcggggcaacaccuucagccucgaggagguggacaagcuggggugccgcgacacccggcugcuccuguga

SEQ ID NO: 9161 - RNA, 3123 nt, Artificial Sequence
  derived and/or modified sequence opt2 from NOD2__Homo_sapiens__AAG33677
augggcgaggagggcggcuccgccucccacgacgaggaggagcgcgccuccguccuccucggccacucccccggcugcgagaugugcucccaggaggccuuccaggcccagcgcucccagcucgucgagcuccucgucuccggcucccucgagggcuucgaguccguccucgacuggcuccucuccugggagguccucuccugggaggacuacgagggcuuccaccuccucggccagccccucucccaccucgcccgccgccuccucgacaccgucuggaacaagggcaccugggccugccagaagcucaucgccgccgcccaggaggcccaggccgacucccagucccccaagcuccacggcugcugggacccccacucccuccaccccgcccgcgaccuccagucccaccgccccgccaucguccgccgccuccacucccacgucgagaacaugcucgaccucgccugggagcgcggcuucgucucccaguacgagugcgacgagauccgccuccccaucuucacccccucccagcgcgcccgccgccuccucgaccucgccaccgucaaggccaacggccucgccgccuuccuccuccagcacguccaggagcuccccgucccccucgcccucccccucgaggccgccaccugcaagaaguacauggccaagcuccgcaccaccgucuccgcccagucccgcuuccucuccaccuacgacggcgccgagacccucugccucgaggacaucuacaccgagaacguccucgaggucugggccgacgucggcauggccggccccccccagaagucccccgccacccucggccucgaggagcucuucuccacccccggccaccucaacgacgacgccgacaccguccucgucgucggcgaggccggcuccggcaaguccacccuccuccagcgccuccaccuccucugggccgccggccaggacuuccaggaguuccucuucgucuuccccuucuccugccgccagcuccagugcauggccaagccccucuccguccgcacccuccucuucgagcacugcugcuggcccgacgucggccaggaggacaucuuccagcuccuccucgaccaccccgaccgcguccuccucaccuucgacggcuucgacgaguucaaguuccgcuucaccgaccgcgagcgccacugcucccccaccgaccccaccuccguccagacccuccucuucaaccuccuccagggcaaccuccucaagaacgcccgcaaggucgucaccucccgccccgccgccgucuccgccuuccuccgcaaguacauccgcaccgaguucaaccucaagggcuucuccgagcagggcaucgagcucuaccuccgcaagcgccaccacgagcccggcgucgccgaccgccucauccgccuccuccaggagaccuccgcccuccacggccucugccaccuccccgucuucuccuggauggucuccaagugccaccaggagcuccuccuccaggagggcggcucccccaagaccaccaccgacauguaccuccucauccuccagcacuuccuccuccacgccaccccccccgacuccgccucccagggccucggccccucccuccuccgcggccgccuccccacccuccuccaccucggccgccucgcccucuggggccucggcaugugcugcuacgucuucuccgcccagcagcuccaggccgcccaggucucccccgacgacaucucccucggcuuccucguccgcgccaagggcgucguccccggcuccaccgccccccucgaguuccuccacaucaccuuccagugcuucuucgccgccuucuaccucgcccucuccgccgacgucccccccgcccuccuccgccaccucuucaacugcggccgccccggcaacucccccauggcccgccuccuccccaccaugugcauccaggccuccgagggcaaggacuccuccgucgccgcccuccuccagaaggccgagccccacaaccuccagaucaccgccgccuuccucgccggccuccucucccgcgagcacuggggccuccucgccgagugccagaccuccgagaaggcccuccuccgccgccaggccugcgcccgcuggugccucgcccgcucccuccgcaagcacuuccacuccaucccccccgccgcccccggcgaggccaaguccguccacgccaugcccggcuucaucuggcucauccgcucccucuacgagaugcaggaggagcgccucgcccgcaaggccgcccgcggccucaacgucggccaccucaagcucaccuucugcuccgucggccccaccgagugcgccgcccucgccuucguccuccagcaccuccgccgccccgucgcccuccagcucgacuacaacuccgucggcgacaucggcgucgagcagcuccuccccugccucggcgucugcaaggcccucuaccuccgcgacaacaacaucuccgaccgcggcaucugcaagcucaucgagugcgcccuccacugcgagcagcuccagaagcucgcccucuucaacaacaagcucaccgacggcugcgcccacuccauggccaagcuccucgccugccgccagaacuuccucgcccuccgccucggcaacaacuacaucaccgccgccggcgcccagguccucgccgagggccuccgcggcaacaccucccuccaguuccucggcuucuggggcaaccgcgucggcgacgagggcgcccaggcccucgccgaggcccucggcgaccaccagucccuccgcuggcucucccucgucggcaacaacaucggcuccgucggcgcccaggcccucgcccucaugcucgccaagaacgucaugcucgaggagcucugccucgaggagaaccaccuccaggacgagggcgucugcucccucgccgagggccucaagaagaacuccucccucaagauccucaagcucuccaacaacugcaucaccuaccucggcgccgaggcccuccuccaggcccucgagcgcaacgacaccauccucgaggucuggcuccgcggcaacaccuucucccucgaggaggucgacaagcucggcugccgcgacacccgccuccuccucuga

SEQ ID NO: 9162 - RNA, 3123 nt, Artificial Sequence
  derived and/or modified sequence opt3 from NOD2__Homo_sapiens__AAG33677
augggcgaggaagggggaagcgccucccacgacgaggaagagagagcuucugugcugcucggucauucacccggcugcgaaauguguagucaggaggcauuccaagcccagaggagccagcuugucgagcuguugguuuccgggucuuuagaaggauuugagucggugcuggauuggcuacucucaugggaaguacugagcugggaggacuacgagggcuuccaccuucugggucagccuuugagucaucucgcgcggcgccugcuggauaccguguggaacaaggggacaugggcuugccaaaaacucaucgccgcagcccaggaagcucaggcagacucccagucuccaaaguuacacggauguugggauccgcauagccugcaccccgcccgagaccuucaaucccaccguccugcuauugucagaagguugcauucacacguggagaauaugcuggaucuagccugggaacggggcuuuguuagucaguaugagugcgacgaaauacgccucccaaucuucacucccagccagagagcgaggcggcugcuugaucuggcaacggugaaagccaacggcuuggcugccuuucuccugcagcauguccaagaguuaccugugccacuggcacucccccuugaggcugccaccuguaagaaauacauggcgaagcugcgcacaacuguaucugcccagucccgauucuugucaaccuaugacggggcagaaacacuaugccuggaggauauuuacaccgaaaauguucucgaggugugggcugacgucggaauggccgguccuccacagaagucuccggcuacucugggccuugaggagcuguuuaguacacccgggcacuugaacgaugacgccgacaccgugcucguggucggagaggcaggcucugguaaauccacgcuguuacaaagacugcaccuacucugggccgcugggcaggauuuccaggaauuucuguucguuuuuccuuucagcuguaggcagcuucaaugcauggcgaagccauugucggugcggacucugcucuuugagcauuguugcuggcccgacguaggacaggaagauaucuuccagcugcuucuggaccacccugaucguguguugcucaccuucgacggcuuugaugaguucaaauuucgcuucacagacagagaaaggcauuguucuccaacugaucccaccuccguccagacacuguuauuuaaucugcuacaaggcaaccuccugaagaaugcacggaaagugguuaccucacgaccggccgcugugagugccuuccuucgcaaguauauuagaacggaguuuaacuugaagggguucagcgagcagggaaucgaacuguaccucaggaaacggcaccaugagccuggugucgcagaccgccugauaagauuacugcaggaaacuuccgcccuucacggcuugugccaccuccccguguuuucuuggaugguaagcaagugccaucaggagcugcuacugcaagaagggggaucaccaaaaacaaccacugauauguaucuccugauccuucagcacuucuugcugcaugcuacaccucccgacagugccucccagggcuuagguccaagccuccugagggggcgucuucccacccuguugcaccucggccggcuggcacuauggggacugggcauguguugcuacguuuuuagcgcgcagcaacuccaggcugcccaggugucaccugacgauauuagucugggguuccuuguccgagcaaagggaguggucccagguagcacggccccguuggaauuucugcacaucaccuuccaauguuucuuugcugccuucuacuuagcacucuccgcugacgugcccccugcccugcuuagacaucuguuuaauugcggcaggccagggaacucucccauggcgcgccuacucccuacaauguguauucaggccucggagggaaaagauagcuccguugcugcacuguugcagaaggccgaaccacacaaucugcagaucacugcugccuucuuagcaggccuccugucacgggagcauuggggucuucuggcggaaugccaaaccagugagaaagccuugcucagaaggcaggcuugugcccgcuggugccuggcacgaucucuacggaagcacuuucauagcauacccccggcugccccuggggaggcaaaguccgugcacgccaugccaggcuucauuuggcugauccguucacuuuaugaaaugcaggaggaaagacucgcuaggaaagcggcccgcggacugaacguaggccacuugaagcugacauuuuguagcgucgggcccacugagugcgcagcuuuagccuucgugcuccagcaucugcggagaccuguugcccuucaacuggacuacaauucugugggagauauuggugucgaacaguugcuccccugucugggcgugugcaaagcucuauaucugagggacaacaauaucuccgaucgagggaucugcaaacuuauugagugugcacuccacugcgagcagcugcagaaauuggccuuauuuaacaacaagcugaccgacggaugugcgcauaguauggcuaagcuccuggccugccgccaaaauuuccuugcacugcgguugggcaacaauuacauaacagccgcuggugcacagguacuagccgaagggcugagaggcaacaccagccuccaguuucugggauucuggggcaauagggugggggaugagggagcgcaagcucuugccgaagcauuaggcgaccaccagucucugcguuggcucuccuugguugguaacaauaucgggucagucggagcccaggcucuggcccucaugcuggcaaagaacgugaugcuugaggaacuguguuuggaggagaaucaucuacaggaugaaggcgugugcagucuggcugagggucucaagaaaaacagcucguuaaagauucugaaacuuuccaauaacuguaucacuuaucugggcgccgaagcgcucuugcaagcccuggagcgcaaugacacgauacucgaggucuggcugcgggggaacacauuuucucuugaagagguugauaagcuaggaugcagagacaccaggcuguuguuauga

SEQ ID NO: 9163 - RNA, 3123 nt, Artificial Sequence
  derived and/or modified sequence opt4 from NOD2__Homo_sapiens__AAG33677
augggcgaggagggcggcagcgccagccacgacgaggaggagagagccagcgugcugcugggccacagccccggcugcgagaugugcagccaggaggccuuccaggcccagagaagccagcugguggagcugcuggugagcggcagccuggagggcuucgagagcgugcuggacuggcugcugagcugggaggugcugagcugggaggacuacgagggcuuccaccugcugggccagccccugagccaccuggccagaagacugcuggacaccguguggaacaagggcaccugggccugccagaagcugaucgccgccgcccaggaggcccaggccgacagccagagccccaagcugcacggcugcugggacccccacagccugcaccccgccagagaccugcagagccacagacccgccaucgugagaagacugcacagccacguggagaacaugcuggaccuggccugggagagaggcuucgugagccaguacgagugcgacgagaucagacugcccaucuucacccccagccagagagccagaagacugcuggaccuggccaccgugaaggccaacggccuggccgccuuccugcugcagcacgugcaggagcugcccgugccccuggcccugccccuggaggccgccaccugcaagaaguacauggccaagcugagaaccaccgugagcgcccagagcagauuccugagcaccuacgacggcgccgagacccugugccuggaggacaucuacaccgagaacgugcuggaggugugggccgacgugggcauggccggccccccccagaagagccccgccacccugggccuggaggagcuguucagcacccccggccaccugaacgacgacgccgacaccgugcugguggugggcgaggccggcagcggcaagagcacccugcugcagagacugcaccugcugugggccgccggccaggacuuccaggaguuccuguucguguuccccuucagcugcagacagcugcagugcauggccaagccccugagcgugagaacccugcuguucgagcacugcugcuggcccgacgugggccaggaggacaucuuccagcugcugcuggaccaccccgacagagugcugcugaccuucgacggcuucgacgaguucaaguucagauucaccgacagagagagacacugcagccccaccgaccccaccagcgugcagacccugcuguucaaccugcugcagggcaaccugcugaagaacgccagaaagguggugaccagcagacccgccgccgugagcgccuuccugagaaaguacaucagaaccgaguucaaccugaagggcuucagcgagcagggcaucgagcuguaccugagaaagagacaccacgagcccggcguggccgacagacugaucagacugcugcaggagaccagcgcccugcacggccugugccaccugcccguguucagcuggauggugagcaagugccaccaggagcugcugcugcaggagggcggcagccccaagaccaccaccgacauguaccugcugauccugcagcacuuccugcugcacgccaccccccccgacagcgccagccagggccugggccccagccugcugagaggcagacugcccacccugcugcaccugggcagacuggcccuguggggccugggcaugugcugcuacguguucagcgcccagcagcugcaggccgcccaggugagccccgacgacaucagccugggcuuccuggugagagccaagggcguggugcccggcagcaccgccccccuggaguuccugcacaucaccuuccagugcuucuucgccgccuucuaccuggcccugagcgccgacgugccccccgcccugcugagacaccuguucaacugcggcagacccggcaacagccccauggccagacugcugcccaccaugugcauccaggccagcgagggcaaggacagcagcguggccgcccugcugcagaaggccgagccccacaaccugcagaucaccgccgccuuccuggccggccugcugagcagagagcacuggggccugcuggccgagugccagaccagcgagaaggcccugcugagaagacaggccugcgccagauggugccuggccagaagccugagaaagcacuuccacagcaucccccccgccgcccccggcgaggccaagagcgugcacgccaugcccggcuucaucuggcugaucagaagccuguacgagaugcaggaggagagacuggccagaaaggccgccagaggccugaacgugggccaccugaagcugaccuucugcagcgugggccccaccgagugcgccgcccuggccuucgugcugcagcaccugagaagacccguggcccugcagcuggacuacaacagcgugggcgacaucggcguggagcagcugcugcccugccugggcgugugcaaggcccuguaccugagagacaacaacaucagcgacagaggcaucugcaagcugaucgagugcgcccugcacugcgagcagcugcagaagcuggcccuguucaacaacaagcugaccgacggcugcgcccacagcauggccaagcugcuggccugcagacagaacuuccuggcccugagacugggcaacaacuacaucaccgccgccggcgcccaggugcuggccgagggccugagaggcaacaccagccugcaguuccugggcuucuggggcaacagagugggcgacgagggcgcccaggcccuggccgaggcccugggcgaccaccagagccugagauggcugagccuggugggcaacaacaucggcagcgugggcgcccaggcccuggcccugaugcuggccaagaacgugaugcuggaggagcugugccuggaggagaaccaccugcaggacgagggcgugugcagccuggccgagggccugaagaagaacagcagccugaagauccugaagcugagcaacaacugcaucaccuaccugggcgccgaggcccugcugcaggcccuggagagaaacgacaccauccuggagguguggcugagaggcaacaccuucagccuggaggagguggacaagcugggcugcagagacaccagacugcugcuguga

SEQ ID NO: 9164 - RNA, 3123 nt, Artificial Sequence
  derived and/or modified sequence opt5 from NOD2__Homo_sapiens__AAG33677
augggcgaggaagggggaagcgccucccacgacgaggaagagagagcuucugugcugcucggccauagccccgggugcgaaauguguucccaggaggccuuccaagcgcagcggucucagcuggucgagcuucugguuagcggaucccucgaaggcuuugagucugugcuggauuggcuucugagcugggaagugcucuccugggaggacuacgagggguuccaucugcugggacagccucucagccaccuggcucgcagacuucuggauaccgucuggaacaagggcacaugggccugccaaaaacucaucgccgcugcccaggaagcucaggccgacucucaguccccgaagcugcacggcuguugggauccccauagccuucacccugcgcgggaccugcaaucucaccgccccgccauugugagacggcuccauucccacguugagaauaugcuggaucuggcuugggaacgcggguuugugagccaguaugagugcgacgaaaucagacucccuauuuucacgcccucucagcgggcccgcagacugcuugaucuggcuaccgucaaagccaacggacucgcggccuuucugcuucagcaugugcaagagcugccuguuccgcucgcucugccccuggaggccgcuacauguaagaaauacauggccaagcuccggaccacaguguccgcccagagccgcuuccuguccaccuaugacggcgcugaaacacuuugccuggaggauaucuacaccgaaaauguccucgaggugugggcggacguggggauggccggaccuccccagaagucuccugcuacgcugggccuugaggaacuguuuagcacccccgggcaccucaacgaugacgccgacacaguccugguugugggagaggccggcuccggcaaaagcacccugcuccaaagacugcaccuucugugggcugccgggcaggauuuccaggaauuucucuucguguuuccguucucuugucggcagcugcaaugcauggcgaagccucuguccguccgcacacuucucuuugagcauuguugcuggcccgacgugggacaggaagauauuuuccagcugcugcucgaccacccugauagaguucugcuuaccuucgacggcuuugaugaguucaaauuucgguucacggacagagaacgccauuguagccccacagaucccaccucugugcagacacugcucuuuaaucugcugcaagggaaccuucucaagaaugcucggaaagucgugaccagcagaccugccgccguuuccgcuuuccugcgcaaguauauccggaccgaguuuaaccugaagggauucucugagcagggcaucgaacucuaccugagaaaacgccaccaugagccggggguggccgaccggcuuauuagacugcuccaggaaacaagcgcucugcacggacugugccaccuucccgucuuuuccuggauggugagcaagugccaucaggagcuccugcugcaagagggcggcucuccuaaaacgaccacagauauguaucuccugauccuucagcacuuccugcuccaugccacacccccugacuccgcgagccaggggcugggacccucucugcuucgcggccggcucccgacccugcugcaccucgggagacuggcccuuuggggacugggcauguguugcuacgucuuuuccgcucagcaacuccaggccgcucaggugagcccugacgauauuucccugggguuccugguucgcgccaagggcgugguccccggaucuaccgcgccucuugaauuucugcacaucacguuccaauguuucuuugccgcuuucuaccucgcccugagcgcugacgugcccccugcccuccugcggcaucuuuuuaauugcggcagacccgggaacuccccgauggcccggcugcucccuacaauguguauucaggcuucugagggaaaagauagcuccguugcggcccugcugcagaaggcugaaccccacaaucuucagaucaccgccgccuuccuggcuggccuccugagccgcgagcauugggggcuccuggccgaaugccaaaccucugagaaagcgcuucugagacggcaggcuugugccagauggugccucgcccgcucccugcggaagcacuuucauagcauucccccugcugccccgggagaggcgaagucugugcacgcuaugcccggcuucaucuggcugaucagaucccuuuaugaaaugcaggaggaacgccuggccagaaaagccgcucgggggcucaacgucggccaccugaagcucacauuuuguagcgugggaccuaccgagugcgccgcucuggccuucgugcuucagcaucugcgcagacccguugcgcugcaacucgacuacaauucugucggcgauauugggguggaacagcugcuuccuugucugggagugugcaaagcccucuaucugcgggacaacaauaucagcgaucgcggcauuugcaagcucaucgagugugcucugcacugcgagcagcuucagaaacuggcccuguuuaacaacaagcucacagacgggugugcucauuccauggccaagcugcuugccugcagacaaaauuuccuggcucuccggcugggaaacaauuacauuacggcggccggcgcucagguccucgccgaagggcugcgcggcaacaccagccuucaguuucugggauucuggggcaauagagugggggaugagggagcccaagcucuggccgaagcgcucggcgaccaccagucucugcgguggcuuucccugguugggaacaauaucggaagcgugggcgcucaggcccucgcccugaugcucgcuaaaaacgucaugcuggaggaacuuugucuggaggagaaucaucugcaggaugaaggggugugcucccucgccgagggccugaagaaaaacucuagccuuaagauccugaaacucuccaauaacuguauuacauaucugggagcggaagcucugcuccaagcccuugagcgcaaugacaccauccuggagguuuggcugagaggcaacacauuuucucucgaagagguggauaagcuggggugccgggacaccagacuucugcucuga

SEQ ID NO: 9165 - protein, 1065 aa, Artificial Sequence
  NOD3__Homo_sapiens__C3VPR7
MRKQEVRTGREAGQGHGTGSPAEQVKALMDLLAGKGSQGSQAPQALDRTPDAPLGPCSNDSRIQRHRKALLSKVGGGPELGGPWHRLASLLLVEGLTDLQLREHDFTQVEATRGGGHPARTVALDRLFLPLSRVSVPPRVSITIGVAGMGKTTLVRHFVRLWAHGQVGKDFSLVLPLTFRDLNTHEKLCADRLICSVFPHVGEPSLAVAVPARALLILDGLDECRTPLDFSNTVACTDPKKEIPVDHLITNIIRGNLFPEVSIWITSRPSASGQIPGGLVDRMTEIRGFNEEEIKVCLEQMFPEDQALLGWMLSQVQADRALYLMCTVPAFCRLTGMALGHLWRSRTGPQDAELWPPRTLCELYSWYFRMALSGEGQEKGKASPRIEQVAHGGRKMVGTLGRLAFHGLLKKKYVFYEQDMKAFGVDLALLQGAPCSCFLQREETLASSVAYCFTHLSLQEFVAAAYYYGASRRAIFDLFTESGVSWPRLGFLTHFRSAAQRAMQAEDGRLDVFLRFLSGLLSPRVNALLAGSLLAQGEHQAYRTQVAELLQGCLRPDAAVCARAINVLHCLHELQHTELARSVEEAMESGALARLTGPAHRAALAYLLQVSDACAQEANLSLSLSQGVLQSLLPQLLYCRKLRLDTNQFQDPVMELLGSVLSGKDCRIQKISLAENQISNKGAKALARSLLVNRSLTSLDLRGNSIGPQGAKALADALKINRTLTSLSLQGNTVRDDGARSMAEALASNRTLSMLHLQKNSIGPMGAQRMADALKQNRSLKELMFSSNSIGDGGAKALAEALKVNQGLESLDLQSNSISDAGVAALMGALCTNQTLLSLSLRENSISPEGAQAIAHALCANSTLKNLDLTANLLHDQGARAIAVAVRENRTLTSLHLQWNFIQAGAAQALGQALQLNRSLTSLDLQENAIGDDGACAVARALKVNTALTALYLQVASIGASGAQVLGEALAVNRTLEILDLRGNAIGVAGAKALANALKVNSSLRRLNLQENSLGMDGAICIATALSGNHRLQHINLQGNHIGDSGARMISEAIKTNAPTCTVEM

SEQ ID NO: 9166 - RNA, 3198 nt, Artificial Sequence
  NOD3__Homo_sapiens__ACP40993
augaggaagcaagaggugcggacgggcagggaggccggccagggccacgguacgggcuccccagccgagcaggugaaagcccucauggaucugcuggcugggaagggcagucaaggcucccaggccccgcaggcccuggauaggacaccggaugccccgcuggggcccugcagcaaugacucaaggauacagaggcaccgcaaggcccugcugagcaaggugggagguggcccggagcugggcggacccuggcacaggcuggccucccuccugcugguggagggccugacggaccugcagcugagggaacacgacuucacacagguggaggccacccgcgggggcgggcaccccgccaggaccgucgcccuggaccggcucuuccugccucucucccgggugucugucccaccccgggucuccaucacuaucgggguggccggcaugggcaagaccacccuggugaggcacuucguccgccucugggcccaugggcaggucggcaaggacuucucgcuggugcugccucugaccuuccgggaucucaacacccacgagaagcugugugccgaccgacucaucugcucggucuucccgcacgucggggagcccagccuggcgguggcagucccagccagggcccuccugauccuggacggcuuggaugagugcaggacgccucuggacuucuccaacaccguggccugcacggacccaaagaaggagaucccgguggaccaccugaucaccaacaucauccguggcaaccucuuuccggaaguuuccaucuggaucaccucccgucccagugcaucuggccagaucccagggggccugguggaccggaugacggagauccggggcuuuaacgaggaggagaucaagguguguuuggagcagauguuccccgaggaccaggcccuucugggcuggaugcugagccaagugcaggcugacagggcccuguaccugaugugcaccgucccagccuucugcaggcucacggggauggcgcuaggccaccuguggcgcagcaggacggggccccaggaugcagagcuguggcccccgaggacccugugcgagcucuacucaugguacuuuaggauggcccucagcggggaggggcaggagaagggcaaggcaagcccucgcaucgagcagguggcccaugguggccgcaagaugguggggacauugggccgucuggccuuccaugggcugcucaagaagaaauacguguuuuacgagcaagacaugaaggcguuugguguagaccucgcucugcugcagggcgccccgugcagcugcuuccugcagagagaggagacguuggcaucgucaguggccuacugcuucacccaccugucccugcaggaguuuguggcagccgcguauuacuauggcgcauccaggagggccaucuucgaccucuucacugagagcggcguauccuggcccaggcugggcuuccucacgcauuucaggagcgcagcccagcgggccaugcaggcagaggacgggaggcuggacguguuccugcgcuuccucuccggccucuugucuccgagggucaaugcccuccuggccggcucccugcuggcccaaggcgagcaccaggccuaccggacccagguggcugagcuccugcagggcugccugcgccccgaugccgcagucugugcacgggccaucaacguguugcacugccugcaugagcugcagcacaccgagcuggcccgcagcguggaggaggccauggagagcggggcccuggccaggcugacuggucccgcgcaccgcgcugcccuggccuaccuccugcagguguccgacgccugugcccaggaggccaaccugucccugagccucagccagggcguccuucagagccugcugccccagcugcucuacugccggaagcucaggcuggacaccaaccaguuccaggaccccgugauggagcugcugggcagcgugcugagugggaaggacugucgcauucagaagaucagcuuggcggagaaccagaucaguaacaaaggggccaaagcucuggccagaucccucuuggucaacagaagucugaccucucuggaccuccgcgguaacuccauuggaccacaaggggccaaggcgcuggcagacgcuuugaagaucaaccgcacccugaccucccugagccuccagggcaacaccguuagggaugauggugccagguccauggcugaggccuuggccuccaaccggacccucuccaugcugcaccugcagaagaacagcaucgggcccaugggagcccagcggauggcagaugccuugaagcagaacaggagucugaaagagcucauguucuccaguaauaguauuggugauggaggugccaaggcccuggcugaggcccugaaggugaaccagggccuggagagccuggaccugcagagcaauuccaucagugacgcaggaguggcagcacugaugggggcccucugcaccaaccagacccuccucagccucagccuucgagaaaacuccaucagucccgagggagcccaggccaucgcucaugcccucugcgccaacagcacccugaagaaccuggaccugacagccaaccuccuccacgaccagggugcccgggccaucgcaguggcagugagagaaaaccgcacccucaccucccuucaccugcaguggaacuucauccaggccggcgcugcccaggcccugggacaagcacuacagcucaacaggagccucaccagcuuagauuuacaggagaacgccaucggggaugacggagcgugugcgguggcccgugcacugaaggucaacacagcccucacugcucucuaucuccagguggccucaauuggugcuucaggcgcccaggugcuaggggaagccuuggcugugaacagaaccuuggagauucucgacuuaagaggaaaugccauugggguggcuggagccaaagcccuggcaaaugcucugaagguaaacucaagucuccggagacucaaucuucaagagaauucucuggggauggacggggcgauaugcauugccacagcacugucuggaaaccacaggcuccagcauaucaaucuccagggaaaccacauuggggacuccggggccaggaugaucucagaggccaucaagacaaaugcucccacgugcacuguugaaauguga

SEQ ID NO: 9167 - RNA, 3198 nt, Artificial Sequence
  derived and/or modified sequence opt1 from NOD3__Homo_sapiens__ACP40993
augcgcaagcaggaggugcggaccggccgcgaggccgggcagggccacgggaccggcagccccgccgagcaggucaaggcgcugauggaccuccuggccgggaagggcucccagggcagccaggccccgcaggcccuggaccggacccccgacgcgccccucgggcccugcuccaacgacagccgcauccagcggcaccgcaaggcccugcuguccaaggugggcgggggcccggagcucgggggccccuggcaccggcuggccagccugcuccugguggagggccugaccgaccuccagcugcgcgagcacgacuucacccaggucgaggccacccgcgggggcgggcaccccgcccggacgguggcgcuggaccggcuguuccugccccugucccgcgugagcgucccgccccggguguccaucaccaucggcguggccggcauggggaagaccacccucguccgccacuucgugcggcugugggcccacggccagguggggaaggacuucagccugguccucccccugacguuccgcgaccugaacacccacgagaagcucugcgccgaccggcugaucugcuccguguucccccacgugggcgagccgagccuggccgucgcggugcccgcccgcgcccuccugauccuggacgggcucgacgagugccggacgccccuggacuucuccaacaccguggccugcaccgaccccaagaaggagaucccggucgaccaccugaucaccaacaucauccgcggcaaccucuuccccgaggugagcaucuggaucaccucccggcccagcgccuccggccagauccccgggggccugguggaccgcaugaccgagauccgcggguucaacgaggaggagaucaaggucugccuggagcagauguucccggaggaccaggcgcuccugggcuggaugcugagccaggugcaggccgaccgggcccucuaccugaugugcacggugcccgccuucugccgccugaccgggauggcccucggccaccuguggcggucccgcaccggcccccaggacgcggagcuguggcccccgcggacccucugcgagcuguacagcugguacuuccgcauggcccugagcggggagggccaggagaaggggaaggccagcccccggaucgagcaggucgcccacggcgggcgcaagauggugggcacgcucggccggcuggccuuccacgggcugcugaagaagaaguacgucuucuacgagcaggacaugaaggcguucggcguggaccucgcccugcugcagggggcccccugcuccugcuuccuccagcgcgaggagacccuggccuccagcguggcguacugcuucacccaccugucccuccaggaguucgucgccgccgccuacuacuacggcgccagccggcgcgcgaucuucgaccuguucaccgaguccggcgugagcuggccccggcugggguuccucacgcacuuccgcuccgccgcccagcgggccaugcaggccgaggacggccgccuggacguguuccugcgguuccucagcgggcugcuguccccgcgcgucaacgcgcuccuggccggcagccugcucgcccagggggagcaccaggccuaccggacccagguggccgagcugcugcagggcugccuccgccccgacgcggccgugugcgcccgcgccaucaacguccugcacugccugcacgagcuccagcacaccgagcuggcgcgguccguggaggaggccauggagagcggcgcccuggcccgccucaccgggcccgcccaccgggcggcccuggccuaccugcuccagguguccgacgccugcgcccaggaggcgaaccugagccugucccucagccagggcguccugcagucccugcucccgcagcugcuguacugccgcaagcuccggcuggacacgaaccaguuccaggaccccgugauggagcugcucgggagcgugcugagcggcaaggacugccgcauccagaagaucucccuggccgagaaccagaucagcaacaagggggccaaggcccucgcccggucccugcuggucaaccgcagccucaccucccuggaccugcggggcaacagcaucggcccccagggggcgaaggcccucgccgacgcccugaagaucaaccgcacccugaccucccucagccugcagggcaacacggugcgggacgacggggcgcgcuccauggccgaggcccuggccagcaaccggacccucuccaugcugcaccuccagaagaacagcaucggccccaugggggcccagcgcauggcggacgcccucaagcagaaccggucccugaaggagcugauguucagcuccaacagcaucggcgacggcggggccaaggcccucgccgaggcgcugaaggugaaccagggccuggagucccucgaccugcagagcaacagcaucuccgacgccggggucgccgcccugaugggcgcccucugcaccaaccagacccugcugagccucucccugcgcgagaacagcaucuccccggagggggcgcaggccaucgcccacgcccugugcgccaacagcacgcucaagaaccuggaccugaccgcgaaccuccugcacgaccagggcgcccgggccaucgccguggcggugcgcgagaaccggacccugaccucccuccaccuccaguggaacuucauccaggccggcgccgcccaggcccuggggcaggcgcugcagcugaaccgcagccugaccucccucgaccugcaggagaacgccaucggcgacgacggggccugcgccgucgcccgggcgcugaaggugaacacggcccucaccgcccuguaccuccagguggccagcaucggcgccuccggcgcgcagguccugggggaggcccuggccgugaaccgcacccuggagauccuggaccuccgcggcaacgccaucgggguggcgggcgccaaggcccuggccaacgcccugaaggucaacagcucccuccggcgccugaaccugcaggagaacagccucgggauggacggcgcgaucugcaucgccaccgcccuguccggcaaccaccggcugcagcacaucaaccuccaggggaaccacaucggcgacagcggggcccgcaugaucuccgaggccaucaagacgaacgcgcccacgugcaccguggagauguga

SEQ ID NO: 9168 - RNA, 3198 nt, Artificial Sequence
  derived and/or modified sequence opt2 from NOD3__Homo_sapiens__ACP40993
augcgcaagcaggagguccgcaccggccgcgaggccggccagggccacggcaccggcucccccgccgagcaggucaaggcccucauggaccuccucgccggcaagggcucccagggcucccaggccccccaggcccucgaccgcacccccgacgccccccucggccccugcuccaacgacucccgcauccagcgccaccgcaaggcccuccucuccaaggucggcggcggccccgagcucggcggccccuggcaccgccucgccucccuccuccucgucgagggccucaccgaccuccagcuccgcgagcacgacuucacccaggucgaggccacccgcggcggcggccaccccgcccgcaccgucgcccucgaccgccucuuccucccccucucccgcgucuccguccccccccgcgucuccaucaccaucggcgucgccggcaugggcaagaccacccucguccgccacuucguccgccucugggcccacggccaggucggcaaggacuucucccucguccucccccucaccuuccgcgaccucaacacccacgagaagcucugcgccgaccgccucaucugcuccgucuucccccacgucggcgagcccucccucgccgucgccguccccgcccgcgcccuccucauccucgacggccucgacgagugccgcaccccccucgacuucuccaacaccgucgccugcaccgaccccaagaaggagauccccgucgaccaccucaucaccaacaucauccgcggcaaccucuuccccgaggucuccaucuggaucaccucccgccccuccgccuccggccagauccccggcggccucgucgaccgcaugaccgagauccgcggcuucaacgaggaggagaucaaggucugccucgagcagauguuccccgaggaccaggcccuccucggcuggaugcucucccagguccaggccgaccgcgcccucuaccucaugugcaccguccccgccuucugccgccucaccggcauggcccucggccaccucuggcgcucccgcaccggcccccaggacgccgagcucuggcccccccgcacccucugcgagcucuacuccugguacuuccgcauggcccucuccggcgagggccaggagaagggcaaggccuccccccgcaucgagcaggucgcccacggcggccgcaagauggucggcacccucggccgccucgccuuccacggccuccucaagaagaaguacgucuucuacgagcaggacaugaaggccuucggcgucgaccucgcccuccuccagggcgcccccugcuccugcuuccuccagcgcgaggagacccucgccuccuccgucgccuacugcuucacccaccucucccuccaggaguucgucgccgccgccuacuacuacggcgccucccgccgcgccaucuucgaccucuucaccgaguccggcgucuccuggccccgccucggcuuccucacccacuuccgcuccgccgcccagcgcgccaugcaggccgaggacggccgccucgacgucuuccuccgcuuccucuccggccuccucuccccccgcgucaacgcccuccucgccggcucccuccucgcccagggcgagcaccaggccuaccgcacccaggucgccgagcuccuccagggcugccuccgccccgacgccgccgucugcgcccgcgccaucaacguccuccacugccuccacgagcuccagcacaccgagcucgcccgcuccgucgaggaggccauggaguccggcgcccucgcccgccucaccggccccgcccaccgcgccgcccucgccuaccuccuccaggucuccgacgccugcgcccaggaggccaaccucucccucucccucucccagggcguccuccagucccuccucccccagcuccucuacugccgcaagcuccgccucgacaccaaccaguuccaggaccccgucauggagcuccucggcuccguccucuccggcaaggacugccgcauccagaagaucucccucgccgagaaccagaucuccaacaagggcgccaaggcccucgcccgcucccuccucgucaaccgcucccucaccucccucgaccuccgcggcaacuccaucggcccccagggcgccaaggcccucgccgacgcccucaagaucaaccgcacccucaccucccucucccuccagggcaacaccguccgcgacgacggcgcccgcuccauggccgaggcccucgccuccaaccgcacccucuccaugcuccaccuccagaagaacuccaucggccccaugggcgcccagcgcauggccgacgcccucaagcagaaccgcucccucaaggagcucauguucuccuccaacuccaucggcgacggcggcgccaaggcccucgccgaggcccucaaggucaaccagggccucgagucccucgaccuccaguccaacuccaucuccgacgccggcgucgccgcccucaugggcgcccucugcaccaaccagacccuccucucccucucccuccgcgagaacuccaucucccccgagggcgcccaggccaucgcccacgcccucugcgccaacuccacccucaagaaccucgaccucaccgccaaccuccuccacgaccagggcgcccgcgccaucgccgucgccguccgcgagaaccgcacccucaccucccuccaccuccaguggaacuucauccaggccggcgccgcccaggcccucggccaggcccuccagcucaaccgcucccucaccucccucgaccuccaggagaacgccaucggcgacgacggcgccugcgccgucgcccgcgcccucaaggucaacaccgcccucaccgcccucuaccuccaggucgccuccaucggcgccuccggcgcccagguccucggcgaggcccucgccgucaaccgcacccucgagauccucgaccuccgcggcaacgccaucggcgucgccggcgccaaggcccucgccaacgcccucaaggucaacuccucccuccgccgccucaaccuccaggagaacucccucggcauggacggcgccaucugcaucgccaccgcccucuccggcaaccaccgccuccagcacaucaaccuccagggcaaccacaucggcgacuccggcgcccgcaugaucuccgaggccaucaagaccaacgcccccaccugcaccgucgagauguga

SEQ ID NO: 9169 - RNA, 3198 nt, Artificial Sequence
  derived and/or modified sequence opt3 from NOD3__Homo_sapiens__ACP40993
augagaaagcaggaggugaggaccggccgggaagccgggcaaggacacgguacaggcagccccgcugagcaggucaaagcacugauggaccuccuugccgggaagggaucccagggcucucaggcgccucaagcucuggaucgcacuccagacgccccguugggucccugcucaaacgauagucgaauccagcgucauagaaaagcauuacugagcaagguugggggaggcccugaacuaggcgggccauggcacaggcucgccucccugcuucugguggagggauugacggaccuccagcugcgggaacaugauuucacccagguagaggcuacacgcgguggcgggcaccccgcaagaacuguggcccuggacaggcucuuuuuaccucugucucgggucucggugccaccccgcguuucaauuaccauaggaguggcuggcauggguaaaacaacccuuguccgacauuucgugagauugugggcccacgggcaaguaggaaaggauuuuagccugguucuaccucucacuuucagggaccugaauacacacgagaaacuuugugcggaucggcugaucugcaguguguuuccacaugucggcgaaccguccuuggcaguggccgugcccgcucgugcccuccugauuuuagacggccuggaugagugucgcaccccucucgacuucucuaacacggucgcaugcacugaucccaaaaaggaaaucccaguugaccaccuuauuaccaauaucauaagagggaaccuguuuccugaggugagcaucuggauuacauccaggccaucagcuaguggacagauccccgguggcuugguagaccggaugacugagauucgaggguucaaugaagaggaaaucaaagugugucuagagcagauguuuccggaagaucaggcccugcucggauggaugcugagccaaguccaggcggaccgcgcccuuuaccugaugugcaccgugccugcauucuguagauugacaggcauggcucucggucaucuguggaggucucggaccgggccccaggaugccgaguuauggccaccucgcacgcugugcgagcuauauuccugguacuuuagaauggcucucucaggcgaaggacaagagaagggcaaagccagccccaggauagaacagguugcacacgggggacguaagaugguggguacucugggccggcuugccuuccacggguugcugaagaaaaaguaugucuuuuacgagcaggacaugaaggcuuucggaguggaucucgcgcugcuucagggcgcaccauguaguugcuuccugcaacgagaagagacauuggccucuuccguagcuuauuguuuuacccaucucagccugcaggaguucguugccgcagccuacuauuacggugcuucgagaagggccauuuuugacuuauucacugaaucugggguguccuggccccgccugggcuuucuaacacacuuccggucagcagcgcagagagcuaugcaggccgaggauggaaggcucgacgucuuucugcgcuuccuuaguggcuugcugagcccucgagugaacgcacuccuggccggguccuuacuggcucaaggagaacaucaggccuaccggacccaggucgcagagcuuuugcaggguugccuccguccagaugcugccgugugcgcgagagccaucaauguucugcacugucuacaugaacugcaacacacggagcucgcuaggucuguggaggaagcaauggagagcggcgcccuggcucgccuuaccgggccggcccaccgggcagcguuggccuaucuguuacagguaucagacgcuugcgcccaggaagcaaaccucagucugucccuuagccagggaguccugcaaucuuugcucccccagcugcuauacuguagaaagcugaggcucgauacaaaucaguuucaagacccugugauggagcugcuuggcucaguuuugagugguaaagacugccgcauucagaagaucagccuggcugagaaccagaucuccaauaaaggggccaaggcauuagcccgaucucuccuggugaaccggucgcuuacuagccuggaucuaagaggcaauuccauuggaccacagggcgcuaaggcgcucgccgacgcacugaaaauaaacaggaccuugacaucacugaguuuacaagggaauacuguccgugaugacggagcucgcucuauggccgaagcccucgcuagcaaccggacccuguccaugcuucaucugcagaagaacucaaucggccccaugggugcacagagaauggccgaugcguugaaacagaauaggagccucaaggagcugauguucucuuccaacaguauuggggacggaggcgcuaaagcccuagcagaagcccugaaggugaaucaaggucuugagagccucgaucugcagucuaacuccaucucagacgcuggcguagcagccuugaugggggcgcuguguacaaaucagaccuuacucagucugagccuucgagaaaacucgauauccccugagggagcucaggccauugcacacgcccugugcgcuaauucuacuuugaagaaccucgaucugacggccaaucuacugcaugaccaaggcgcacgggcuaucgccguggcgguucgcgagaacagaacacuuaccagccuccaucugcaguggaauuuuauccaggccggggcagcucaagccuugggacaggcuuuacagcugaacaggucacucacuucacuggaucuucaggaaaaugcaauuggcgacgauggugccugugccgucgcucgggcgcugaaagugaacaccgcauugacagcccuauaucugcaaguggcuuccaucggggccucuggagcacagguccucggcgaggcccuggcuguuaaucgaacccuugaaauuuuagaccugagagguaacgcgauaggcguggccggggcaaaggcucucgccaacgcauugaaagugaauagcucccugcgcaggcucaaccugcaggagaauagucuuggaauggacggcgccaucugcauugcuacugcccugagcgggaaccaccguuugcagcacaucaaucuacaaggaaaccacaucggcgauaguggugcgcggaugauuucugaagcaauaaagacaaaugccccaacguguaccguagagauguga

SEQ ID NO: 9170 - RNA, 3198 nt, Artificial Sequence
  derived and/or modified sequence opt4 from NOD3__Homo_sapiens__ACP40993
augagaaagcaggaggugagaaccggcagagaggccggccagggccacggcaccggcagccccgccgagcaggugaaggcccugauggaccugcuggccggcaagggcagccagggcagccaggccccccaggcccuggacagaacccccgacgccccccugggccccugcagcaacgacagcagaauccagagacacagaaaggcccugcugagcaaggugggcggcggccccgagcugggcggccccuggcacagacuggccagccugcugcugguggagggccugaccgaccugcagcugagagagcacgacuucacccagguggaggccaccagaggcggcggccaccccgccagaaccguggcccuggacagacuguuccugccccugagcagagugagcgugccccccagagugagcaucaccaucggcguggccggcaugggcaagaccacccuggugagacacuucgugagacugugggcccacggccaggugggcaaggacuucagccuggugcugccccugaccuucagagaccugaacacccacgagaagcugugcgccgacagacugaucugcagcguguucccccacgugggcgagcccagccuggccguggccgugcccgccagagcccugcugauccuggacggccuggacgagugcagaaccccccuggacuucagcaacaccguggccugcaccgaccccaagaaggagauccccguggaccaccugaucaccaacaucaucagaggcaaccuguuccccgaggugagcaucuggaucaccagcagacccagcgccagcggccagauccccggcggccugguggacagaaugaccgagaucagaggcuucaacgaggaggagaucaaggugugccuggagcagauguuccccgaggaccaggcccugcugggcuggaugcugagccaggugcaggccgacagagcccuguaccugaugugcaccgugcccgccuucugcagacugaccggcauggcccugggccaccuguggagaagcagaaccggcccccaggacgccgagcuguggccccccagaacccugugcgagcuguacagcugguacuucagaauggcccugagcggcgagggccaggagaagggcaaggccagccccagaaucgagcagguggcccacggcggcagaaagauggugggcacccugggcagacuggccuuccacggccugcugaagaagaaguacguguucuacgagcaggacaugaaggccuucggcguggaccuggcccugcugcagggcgcccccugcagcugcuuccugcagagagaggagacccuggccagcagcguggccuacugcuucacccaccugagccugcaggaguucguggccgccgccuacuacuacggcgccagcagaagagccaucuucgaccuguucaccgagagcggcgugagcuggcccagacugggcuuccugacccacuucagaagcgccgcccagagagccaugcaggccgaggacggcagacuggacguguuccugagauuccugagcggccugcugagccccagagugaacgcccugcuggccggcagccugcuggcccagggcgagcaccaggccuacagaacccagguggccgagcugcugcagggcugccugagacccgacgccgccgugugcgccagagccaucaacgugcugcacugccugcacgagcugcagcacaccgagcuggccagaagcguggaggaggccauggagagcggcgcccuggccagacugaccggccccgcccacagagccgcccuggccuaccugcugcaggugagcgacgccugcgcccaggaggccaaccugagccugagccugagccagggcgugcugcagagccugcugccccagcugcuguacugcagaaagcugagacuggacaccaaccaguuccaggaccccgugauggagcugcugggcagcgugcugagcggcaaggacugcagaauccagaagaucagccuggccgagaaccagaucagcaacaagggcgccaaggcccuggccagaagccugcuggugaacagaagccugaccagccuggaccugagaggcaacagcaucggcccccagggcgccaaggcccuggccgacgcccugaagaucaacagaacccugaccagccugagccugcagggcaacaccgugagagacgacggcgccagaagcauggccgaggcccuggccagcaacagaacccugagcaugcugcaccugcagaagaacagcaucggccccaugggcgcccagagaauggccgacgcccugaagcagaacagaagccugaaggagcugauguucagcagcaacagcaucggcgacggcggcgccaaggcccuggccgaggcccugaaggugaaccagggccuggagagccuggaccugcagagcaacagcaucagcgacgccggcguggccgcccugaugggcgcccugugcaccaaccagacccugcugagccugagccugagagagaacagcaucagccccgagggcgcccaggccaucgcccacgcccugugcgccaacagcacccugaagaaccuggaccugaccgccaaccugcugcacgaccagggcgccagagccaucgccguggccgugagagagaacagaacccugaccagccugcaccugcaguggaacuucauccaggccggcgccgcccaggcccugggccaggcccugcagcugaacagaagccugaccagccuggaccugcaggagaacgccaucggcgacgacggcgccugcgccguggccagagcccugaaggugaacaccgcccugaccgcccuguaccugcagguggccagcaucggcgccagcggcgcccaggugcugggcgaggcccuggccgugaacagaacccuggagauccuggaccugagaggcaacgccaucggcguggccggcgccaaggcccuggccaacgcccugaaggugaacagcagccugagaagacugaaccugcaggagaacagccugggcauggacggcgccaucugcaucgccaccgcccugagcggcaaccacagacugcagcacaucaaccugcagggcaaccacaucggcgacagcggcgccagaaugaucagcgaggccaucaagaccaacgcccccaccugcaccguggagauguga

SEQ ID NO: 9171 - RNA, 3198 nt, Artificial Sequence
  derived and/or modified sequence opt5 from NOD3__Homo_sapiens__ACP40993
augagaaagcaggaggugcggaccggccgcgaagccgggcaaggacacggcacagggagccccgcugagcaggucaaagcccugauggaccuccuggcgggaaagggcucccaggggucucaggcuccucaagcccuugauagaacgccggacgcuccccugggaccuugcagcaacgauucccggauccagcgccauagaaaagcccuccugucuaagguuggcggcgggcccgaacuuggaggcccuuggcaccggcuggccagccuccugcugguggaggggcucaccgaccugcagcuucgcgaacaugauuucacacagguggaggcuaccagaggaggcgggcaccccgcccggacagucgcgcuggaccgccucuuucugccucuuuccagagugucuguuccgccccgggugagcauuaccaucggagucgccggcaugggcaaaacaacccuggugcgccauuucguuagacucugggcucacgggcaagugggaaaggauuuuucccugguccugccucucacguuccgggaccugaauacccacgagaaacuuugugccgaucgccugauuugcagcguguuuccccaugugggcgaaccuucucucgcugucgccguucccgcgagagcccugcuuauccuggacgggcucgaugagugucggacaccgcuggacuucuccaacaccguggcuugcacagauccuaagaaggaaauucccguggaccaccugaucaccaauaucauuagaggaaaccucuuuccugaggucagcaucuggauuacgucucgccccuccgccagcggccagauccccgggggacugguggaccggaugacagagauuagaggcuucaaugaagaggaaaucaaaguuugucuugagcagauguuuccugaagaucaggcucugcucggcuggaugcugucucaagugcaggccgaccgcgcccuuuaccugaugugcaccgucccggcuuucugucggcucacagggauggcgcugggacaucuguggagaucccgcaccggcccccaggaugccgagcucuggccuccccggacccugugcgagcuuuauagcugguacuuuagaauggcucuguccggggaaggacaagagaagggcaaagccucuccucgcauugaacagguggcccacgggggccggaagaugguuggaacacucggcagacuggcuuuccacgggcugcuuaagaaaaaguauguguuuuacgagcaggacaugaaagccuucggagucgaucucgcgcugcugcagggcgcucccuguagcugcuuccuccaacgcgaagagacgcuggccuccagcguggccuauuguuuuacccaucuuucucugcaggaguucgucgcugccgcuuacuauuacggggccucccggagagcgaucuuugaccucuucacagaaagcggagugucuuggccgcggcugggcuuucugacccacuuccgcagcgccgcucagagagccaugcaggcugaggaugggcggcuugacguuuuucucagauuccuguccggccugcucucuccucgcgugaacgcccugcuugcgggaagccugcucgcccaaggcgaacaucaggcuuaccggacacaggucgccgagcugcugcaggggugccuuagacccgaugcugccgugugcgcccgcgcuaucaauguucuccacugucugcaugaacugcaacacaccgagcucgcgagauccguggaggaagccauggagagcggagcucuggcccggcuuacgggcccugcccaccgcgcugcccuggcguaucuccugcaggucucugacgcuugcgcccaggaagccaaccugucccuuagccucucucagggggugcugcaaucccugcucccccagcugcuuuacuguagaaagcugcggcucgauacaaaucaguuucaagacccugugauggagcugcugggaagcguucuuuccggcaaagacugccgcauucagaagaucucucuggcugagaaccagauuagcaauaaaggggccaaggcgcucgcuagaucccugcucgucaaccggucucugaccagccuugaucugcgcggcaauuccaucggaccccagggcgccaaggcccucgcugacgcccugaaaauuaacagaacccugacaagccuuucucugcaagggaauaccgugcgggaugacggagcucgcuccauggccgaagcgcucgccagcaacagaacacugucuaugcuccaucugcagaagaacuccaucggcccgaugggggcucagcggauggccgaugcucuuaaacagaauagaagccugaaggagcucauguucucuagcaacuccaucggagacggcggggccaaagcccuggcugaagcgcugaaggugaaucaaggccuugagagccuggaucuccagucuaacuccauuagcgacgccggagucgcugcccugaugggcgcccucuguacgaaucagacccugcuuucccugucucugcgcgaaaacagcaucuccccugagggggcucaggccauugcgcacgcucucugcgccaauucuacacugaagaaccuugaucugaccgccaaucuccugcaugaccaaggagcucgggccaucgcgguggcuguuagagagaaccgcacacucaccagccugcaccuucaguggaauuuuauucaggccggcgccgcucaagcccuggggcaggcucugcagcucaaccggucccugacgucucuugaucugcaggaaaaugccaucggagacgauggcgcgugugccguggcuagagcccucaaagucaacaccgcucugacagcccucuaucugcaaguggccagcaucggcgcuuccggggcgcagguucuuggagaggcccuggcugugaaucgcacccuggaaauucucgaccugcggggcaacgccaucggggucgccggagcuaaggcccuugcgaacgcucugaaagugaauagcucucucagacgccugaaccuccaggaaaauucccugggcauggacggggccauuugcaucgccacagcucuuagcggaaaccaccggcugcagcauauuaaucugcaaggcaaccacaucggcgauucuggggccagaaugauuuccgaggcgaucaagaccaaugcccccacguguacaguugagauguga

SEQ ID NO: 9172 - protein, 1112 aa, Artificial Sequence
  NOD3__Homo_sapiens__H3BLT9
MEMDAPRPPSLAVPGAASRPGRLLDGGHGRQQVQALSSQLLEVIPDSMRKQEVRTGREAGQGHGTGSPAEQVKALMDLLAGKGSQGSQAPQALDRTPDAPLGPCSNDSRIQRHRKALLSKVGGGPELGGPWHRLASLLLVEGLTDLQLREHDFTQVEATRGGGHPARTVALDRLFLPLSRVSVPPRVSITIGVAGMGKTTLVRHFVRLWAHGQVGKDFSLVLPLTFRDLNTHEKLCADRLICSVFPHVGEPSLAVAVPARALLILDGLDECRTPLDFSNTVACTDPKKEIPVDHLITNIIRGNLFPEVSIWITSRPSASGQIPGGLVDRMTEIRGFNEEEIKVCLEQMFPEDQALLGWMLSQVQADRALYLMCTVPAFCRLTGMALGHLWRSRTGPQDAELWPPRTLCELYSWYFRMALSGEGQEKGKASPRIEQVAHGGRKMVGTLGRLAFHGLLKKKYVFYEQDMKAFGVDLALLQGAPCSCFLQREETLASSVAYCFTHLSLQEFVAAAYYYGASRRAIFDLFTESGVSWPRLGFLTHFRSAAQRAMQAEDGRLDVFLRFLSGLLSPRVNALLAGSLLAQGEHQAYRTQVAELLQGCLRPDAAVCARAINVLHCLHELQHTELARSVEEAMESGALARLTGPAHRAALAYLLQVSDACAQEANLSLSLSQGVLQSLLPQLLYCRKLRLDTNQFQDPVMELLGSVLSGKDCRIQKISLAENQISNKGAKALARSLLVNRSLTSLDLRGNSIGPQGAKALADALKINRTLTSLSLQGNTVRDDGARSMAEALASNRTLSMLHLQKNSIGPMGAQRMADALKQNRSLKELMFSSNSIGDGGAKALAEALKVNQGLESLDLQSNSISDAGVAALMGALCTNQTLLSLSLRENSISPEGAQAIAHALCANSTLKNLDLTANLLHDQGARAIAVAVRENRTLTSLHLQWNFIQAGAAQALGQALQLNRSLTSLDLQENAIGDDGACAVARALKVNTALTALYLQVASIGASGAQVLGEALAVNRTLEILDLRGNAIGVAGAKALANALKVNSSLRRLNLQENSLGMDGAICIATALSGNHRLQHINLQGNHIGDSGARMISEAIKTNAPTCTVEM

SEQ ID NO: 9173 - RNA, 3339 nt, Artificial Sequence
  NOD3__Homo_sapiens__EAW85351
auggagauggacgcccccaggccccccagucuugcugucccuggagcagcaucgaggcccgggaggcugcuggauggggggcacggcaggcagcagguucaggcccucucuucacagcuccuggaggugauccccgacuccaugaggaagcaagaggugcggacgggcagggaggccggccagggccacgguacgggcuccccagccgagcaggugaaagcccucauggaucugcuggcugggaagggcagucaaggcucccaggccccgcaggcccuggauaggacaccggaugccccgcuggggcccugcagcaaugacucaaggauacagaggcaccgcaaggcccugcugagcaaggugggagguggcccggagcugggcggacccuggcacaggcuggccucccuccugcugguggagggccugacggaccugcagcugagggaacacgacuucacacagguggaggccacccgcgggggcgggcaccccgccaggaccgucgcccuggaccggcucuuccugccucucucccgggugucugucccaccccgggucuccaucacuaucgggguggccggcaugggcaagaccacccuggugaggcacuucguccgccucugggcccaugggcaggucggcaaggacuucucgcuggugcugccucugaccuuccgggaucucaacacccacgagaagcugugugccgaccgacucaucugcucggucuucccgcacgucggggagcccagccuggcgguggcagucccagccagggcccuccugauccuggacggcuuggaugagugcaggacgccucuggacuucuccaacaccguggccugcacggacccaaagaaggagaucccgguggaccaccugaucaccaacaucauccguggcaaccucuuuccggaaguuuccaucuggaucaccucccgucccagugcaucuggccagaucccagggggccugguggaccggaugacggagauccggggcuuuaacgaggaggagaucaagguguguuuggagcagauguuccccgaggaccaggcccuucugggcuggaugcugagccaagugcaggcugacagggcccuguaccugaugugcaccgucccagccuucugcaggcucacggggauggcgcuaggccaccuguggcgcagcaggacggggccccaggaugcagagcuguggcccccgaggacccugugcgagcucuacucaugguacuuuaggauggcccucagcggggaggggcaggagaagggcaaggcaagcccucgcaucgagcagguggcccaugguggccgcaagaugguggggacauugggccgucuggccuuccaugggcugcucaagaagaaauacguguuuuacgagcaagacaugaaggcguuugguguagaccucgcucugcugcagggcgccccgugcagcugcuuccugcagagagaggagacguuggcaucgucaguggccuacugcuucacccaccugucccugcaggaguuuguggcagccgcguauuacuauggcgcauccaggagggccaucuucgaccucuucacugagagcggcguauccuggcccaggcugggcuuccucacgcauuucaggagcgcagcccagcgggccaugcaggcagaggacgggaggcuggacguguuccugcgcuuccucuccggccucuugucuccgagggucaaugcccuccuggccggcucccugcuggcccaaggcgagcaccaggccuaccggacccagguggcugagcuccugcagggcugccugcgccccgaugccgcagucugugcacgggccaucaacguguugcacugccugcaugagcugcagcacaccgagcuggcccgcagcguggaggaggccauggagagcggggcccuggccaggcugacuggucccgcgcaccgcgcugcccuggccuaccuccugcagguguccgacgccugugcccaggaggccaaccugucccugagccucagccagggcguccuucagagccugcugccccagcugcucuacugccggaagcucaggcuggacaccaaccaguuccaggaccccgugauggagcugcugggcagcgugcugagugggaaggacugucgcauucagaagaucagcuuggcggagaaccagaucaguaacaaaggggccaaagcucuggccagaucccucuuggucaacagaagucugaccucucuggaccuccgcgguaacuccauuggaccacaaggggccaaggcgcuggcagacgcuuugaagaucaaccgcacccugaccucccugagccuccagggcaacaccguuagggaugauggugccagguccauggcugaggccuuggccuccaaccggacccucuccaugcugcaccugcagaagaacagcaucgggcccaugggagcccagcggauggcagaugccuugaagcagaacaggagucugaaagagcucauguucuccaguaauaguauuggugauggaggugccaaggcccuggcugaggcccugaaggugaaccagggccuggagagccuggaccugcagagcaauuccaucagugacgcaggaguggcagcacugaugggggcccucugcaccaaccagacccuccucagccucagccuucgagaaaacuccaucagucccgagggagcccaggccaucgcucaugcccucugcgccaacagcacccugaagaaccuggaccugacagccaaccuccuccacgaccagggugcccgggccaucgcaguggcagugagagaaaaccgcacccucaccucccuucaccugcaguggaacuucauccaggccggcgcugcccaggcccugggacaagcacuacagcucaacaggagccucaccagcuuagauuuacaggagaacgccaucggggaugacggagcgugugcgguggcccgugcacugaaggucaacacagcccucacugcucucuaucuccagguggccucaauuggugcuucaggcgcccaggugcuaggggaagccuuggcugugaacagaaccuuggagauucucgacuuaagaggaaaugccauugggguggcuggagccaaagcccuggcaaaugcucugaagguaaacucaagucuccggagacucaaucuucaagagaauucucuggggauggacggggcgauaugcauugccacagcacugucuggaaaccacaggcuccagcauaucaaucuccagggaaaccacauuggggacuccggggccaggaugaucucagaggccaucaagacaaaugcucccacgugcacuguugaaauguga

SEQ ID NO: 9174 - RNA, 3339 nt, Artificial Sequence
  derived and/or modified sequence opt1 from NOD3__Homo_sapiens__EAW85351
auggagauggacgcgccccgcccgcccagccuggccgugcccggcgccgccucccggcccgggcgccuccuggacggcgggcacggccggcagcagguccaggcccugagcucccagcuccuggaggugaucccggacagcaugcgcaagcaggaggugcggaccgggcgcgaggccggccagggccacgggaccggcucccccgccgagcaggucaaggcgcugauggaccuccuggccgggaagggcagccaggggucccaggcgccccaggcccuggaccggacccccgacgccccgcucggccccugcagcaacgacucccgcauccagcggcaccgcaaggcccugcugagcaaggugggcgggggccccgagcucgggggccccuggcaccggcuggccucccugcuccugguggagggccugaccgaccuccagcugcgcgagcacgacuucacccaggucgaggccacccgcgggggcgggcacccggcccggacgguggcgcuggaccggcuguuccugccccugagccgcguguccgucccgccccgggugagcaucaccaucggcguggccgggaugggcaagaccacccucguccgccacuucgugcggcugugggcccacggccagguggggaaggacuucucccugguccucccccugacguuccgcgaccugaacacccacgagaagcucugcgccgaccggcugaucugcagcguguucccccacgugggcgagcccucccuggccgucgcggugcccgcccgcgcccuccugauccuggacgggcucgacgagugccgcaccccgcuggacuucagcaacaccguggccugcacggaccccaagaaggagauccccgucgaccaccugaucaccaacaucauccggggcaaccucuuccccgagguguccaucuggaucaccagccgcccgagcgccuccgggcagauccccggcggccugguggaccggaugaccgagauccgcggguucaacgaggaggagaucaaggucugccuggagcagauguuccccgaggaccaggcgcuccugggcuggaugcugagccaggugcaggccgaccgggcccucuaccugaugugcacgguccccgccuucugccgccugaccgggauggcccucggccaccuguggcggucccgcaccgggccgcaggacgcggagcuguggccgccccggacccugugcgagcucuacagcugguacuuccgcauggcccuguccggcgagggccaggagaaggggaaggccagcccccggaucgagcaggucgcccacggcgggcgcaagauggugggcacgcugggccggcucgcguuccacgggcugcugaagaagaaguacguguucuacgagcaggacaugaaggccuucggcguggaccucgcccugcugcagggggcccccugcuccugcuuccuccagcgcgaggagacccuggccagcuccguggcguacugcuucacccaccugagccuccaggaguucgucgccgccgccuacuacuacggcgccucccggcgcgcgaucuucgaccuguucaccgagagcgggguguccuggccccggcugggcuuccucacgcacuuccgcagcgccgcccagcgggccaugcaggccgaggacggccgccuggacguguuccugcgcuuccucuccgggcugcugagcccccgggucaacgcgcuccuggccggcucccugcucgcccagggggagcaccaggccuaccgcacccagguggcggagcugcugcagggcugccuccggccggacgccgccgugugcgcccgcgccaucaacguccugcacugccugcacgagcuccagcacaccgagcuggcgcggagcguggaggaggccauggaguccggggcccuggcccgccucaccggccccgcccaccgggcggcccuggccuaccugcuccaggugagcgacgccugcgcccaggaggcgaaccugagccugucccucagccagggcguccugcagucccugcucccccagcugcuguacugccgcaagcuccggcuggacacgaaccaguuccaggaccccgugauggagcugcucgggagcgugcuguccggcaaggacugccgcauccagaagaucagccuggccgagaaccagaucuccaacaagggggccaaggcccucgcgcggagccugcuggucaaccgcucccucaccagccuggaccugcggggcaacuccaucgggccgcagggcgccaaggcccucgccgacgcccugaagaucaaccgcacccugaccagccucucccugcagggcaacacggugcgggacgacggggcgcgcagcauggccgaggcccuggccuccaaccggacccucagcaugcugcaccuccagaagaacuccaucggccccaugggggcccagcgcauggcggacgcccucaagcagaaccggagccugaaggagcugauguucagcuccaacagcaucggcgacgggggcgccaaggcccucgccgaggcgcugaaggugaaccagggccuggagucccucgaccugcagagcaacuccaucagcgacgccggggucgccgcccugaugggcgcccucugcaccaaccagacccugcugucccucagccugcgcgagaacuccaucagccccgagggggcgcaggccaucgcccacgcccugugcgcgaacuccacgcucaagaaccuggaccugaccgccaaccuccugcacgaccagggcgcccgggccaucgccguggcggugcgcgagaaccgcacccugaccagccuccaccuccaguggaacuucauccaggccggcgccgcccaggcccuggggcaggcgcugcagcugaaccggucccugaccagccucgaccugcaggagaacgccaucggcgacgacggggccugcgccgucgcccgcgcgcugaaggugaacacggcccugaccgcccucuaccuccagguggccuccaucggcgcgagcggggcccagguccugggcgaggcccuggccgugaaccggacccuggagauccuggaccuccgcggcaacgccaucgggguggcgggcgccaaggcccuggccaacgcccugaaggucaacuccagccuccggcgccugaaccugcaggagaacucccucgggauggacggcgcgaucugcaucgccaccgcccugagcgggaaccaccggcugcagcacaucaaccuccagggcaaccacaucggcgacagcggggcccgcaugaucuccgaggccaucaagacgaacgcgcccacgugcaccguggagauguga

SEQ ID NO: 9175 - RNA, 3339 nt, Artificial Sequence
  derived and/or modified sequence opt2 from NOD3__Homo_sapiens__EAW85351
auggagauggacgccccccgcccccccucccucgccguccccggcgccgccucccgccccggccgccuccucgacggcggccacggccgccagcagguccaggcccucuccucccagcuccucgaggucauccccgacuccaugcgcaagcaggagguccgcaccggccgcgaggccggccagggccacggcaccggcucccccgccgagcaggucaaggcccucauggaccuccucgccggcaagggcucccagggcucccaggccccccaggcccucgaccgcacccccgacgccccccucggccccugcuccaacgacucccgcauccagcgccaccgcaaggcccuccucuccaaggucggcggcggccccgagcucggcggccccuggcaccgccucgccucccuccuccucgucgagggccucaccgaccuccagcuccgcgagcacgacuucacccaggucgaggccacccgcggcggcggccaccccgcccgcaccgucgcccucgaccgccucuuccucccccucucccgcgucuccguccccccccgcgucuccaucaccaucggcgucgccggcaugggcaagaccacccucguccgccacuucguccgccucugggcccacggccaggucggcaaggacuucucccucguccucccccucaccuuccgcgaccucaacacccacgagaagcucugcgccgaccgccucaucugcuccgucuucccccacgucggcgagcccucccucgccgucgccguccccgcccgcgcccuccucauccucgacggccucgacgagugccgcaccccccucgacuucuccaacaccgucgccugcaccgaccccaagaaggagauccccgucgaccaccucaucaccaacaucauccgcggcaaccucuuccccgaggucuccaucuggaucaccucccgccccuccgccuccggccagauccccggcggccucgucgaccgcaugaccgagauccgcggcuucaacgaggaggagaucaaggucugccucgagcagauguuccccgaggaccaggcccuccucggcuggaugcucucccagguccaggccgaccgcgcccucuaccucaugugcaccguccccgccuucugccgccucaccggcauggcccucggccaccucuggcgcucccgcaccggcccccaggacgccgagcucuggcccccccgcacccucugcgagcucuacuccugguacuuccgcauggcccucuccggcgagggccaggagaagggcaaggccuccccccgcaucgagcaggucgcccacggcggccgcaagauggucggcacccucggccgccucgccuuccacggccuccucaagaagaaguacgucuucuacgagcaggacaugaaggccuucggcgucgaccucgcccuccuccagggcgcccccugcuccugcuuccuccagcgcgaggagacccucgccuccuccgucgccuacugcuucacccaccucucccuccaggaguucgucgccgccgccuacuacuacggcgccucccgccgcgccaucuucgaccucuucaccgaguccggcgucuccuggccccgccucggcuuccucacccacuuccgcuccgccgcccagcgcgccaugcaggccgaggacggccgccucgacgucuuccuccgcuuccucuccggccuccucuccccccgcgucaacgcccuccucgccggcucccuccucgcccagggcgagcaccaggccuaccgcacccaggucgccgagcuccuccagggcugccuccgccccgacgccgccgucugcgcccgcgccaucaacguccuccacugccuccacgagcuccagcacaccgagcucgcccgcuccgucgaggaggccauggaguccggcgcccucgcccgccucaccggccccgcccaccgcgccgcccucgccuaccuccuccaggucuccgacgccugcgcccaggaggccaaccucucccucucccucucccagggcguccuccagucccuccucccccagcuccucuacugccgcaagcuccgccucgacaccaaccaguuccaggaccccgucauggagcuccucggcuccguccucuccggcaaggacugccgcauccagaagaucucccucgccgagaaccagaucuccaacaagggcgccaaggcccucgcccgcucccuccucgucaaccgcucccucaccucccucgaccuccgcggcaacuccaucggcccccagggcgccaaggcccucgccgacgcccucaagaucaaccgcacccucaccucccucucccuccagggcaacaccguccgcgacgacggcgcccgcuccauggccgaggcccucgccuccaaccgcacccucuccaugcuccaccuccagaagaacuccaucggccccaugggcgcccagcgcauggccgacgcccucaagcagaaccgcucccucaaggagcucauguucuccuccaacuccaucggcgacggcggcgccaaggcccucgccgaggcccucaaggucaaccagggccucgagucccucgaccuccaguccaacuccaucuccgacgccggcgucgccgcccucaugggcgcccucugcaccaaccagacccuccucucccucucccuccgcgagaacuccaucucccccgagggcgcccaggccaucgcccacgcccucugcgccaacuccacccucaagaaccucgaccucaccgccaaccuccuccacgaccagggcgcccgcgccaucgccgucgccguccgcgagaaccgcacccucaccucccuccaccuccaguggaacuucauccaggccggcgccgcccaggcccucggccaggcccuccagcucaaccgcucccucaccucccucgaccuccaggagaacgccaucggcgacgacggcgccugcgccgucgcccgcgcccucaaggucaacaccgcccucaccgcccucuaccuccaggucgccuccaucggcgccuccggcgcccagguccucggcgaggcccucgccgucaaccgcacccucgagauccucgaccuccgcggcaacgccaucggcgucgccggcgccaaggcccucgccaacgcccucaaggucaacuccucccuccgccgccucaaccuccaggagaacucccucggcauggacggcgccaucugcaucgccaccgcccucuccggcaaccaccgccuccagcacaucaaccuccagggcaaccacaucggcgacuccggcgcccgcaugaucuccgaggccaucaagaccaacgcccccaccugcaccgucgagauguga

SEQ ID NO: 9176 - RNA, 3339 nt, Artificial Sequence
  derived and/or modified sequence opt3 from NOD3__Homo_sapiens__EAW85351
auggagauggacgcccccagaccuccaagccuggcugugccgggcgcagccuccaggcccgggcggcuccuugauggaggucacggccgccagcaaguccaggcgcugucuucacaguuguuagaaguuaucccugacaguaugcgaaagcaggaggugcguaccgggagagaagcuggacaaggccaugguacagggagcccagccgagcagguaaaagcacugauggaucuacucgccggaaagggcucccagggcucucaggcuccccaagcacuggacaggacuccugaugccccacuugggcccugcucgaacgacucacggauucagcgccacagaaaagcucuguugagcaaggugggagguggcccugaacucgggggaccauggcauaggcuggccagucugcucuuagucgagggccugacggaucuucaguugcgggagcacgacuucacccagguggaagcgacacgcggugggggacauccggcacgaacuguugcccuggauagacuauuucucccccuguccagggugucugucccuccacgggugagcauaaccaucggcguagcuggcauggggaaaacaacccuuguucgucacuucgugcgccugugggcccacggacaagucgguaaggacuuuuccuuggugcucccccugacuuucagagauuuaaauacacaugagaagcugugugcagacaggcucauuugcucaguguuuccucacgucggcgaaccaagucuugcuguugccgugcccgcgcgggcccuguugauccuagaugggcuggacgagugucgaaccccgcucgacuucagcaacacgguagcaugcacugauccuaaaaaggagauucccguggaccaucugaucaccaauauaauccgcggaaaccuuuuuccagaagucucuauuuggaucacauccagaccuucagcuagcggccagauucccggugggcugguggauaggaugacugagauccggggcuucaaugaagaggaaauaaaaguuuguuuggagcagauguuuccagaggaccaagcccuccugggauggauguuaagucaggugcaggcugaucgcgcccuguaccuaaugugcaccguccccgcauucuguagacucacaggcauggcccuggggcaccuuuggaggucucguaccggaccucaggacgcugaauuguggccaccgcggacgcugugcgagcucuauuccugguacuuucgaauggcgcugagcggugaaggccaagagaaggggaaagcaucgcccagaauugaacagguggcccacggaggcaggaagaugguagguacucuugggcgccuggcuuuccauggcuugcucaagaaaaaguauguguuuuacgagcaggauaugaaagccuucggaguggaccuggcauuacugcagggcgccccuuguucuugcuuccuacaacgggaggaaacacucgcuuccucagucgccuauuguuuuacccaccugagucuucaggaguucguggcagcggcuuacuauuacggggccagcagaagggcaaucuuugauuuguucacugaauccggagucucuuggccacgccuggguuuucucacacauuuccgaagcgccgcucagcgggccaugcaggcagaggacggccgucuggauguguuuuuaagauuccugucagggcuuuugagucccaggguuaacgcucuccuggccggaucccuacuggcgcaaggcgaacaccaggccuaccgcacccagguggcugagcuccugcaggguugccuucggccugacgcagccguaugcgcuagagccauuaaugucuugcauugucugcacgaguuacaacacacggaacucgcaaggagcguggaggaagcgauggagucuggggcccuggcucgacuuaccggcccagcccaucgcgcagcucuggccuauuugcuccagguuucagacgcaugcgcccaggaggcuaaccugagucuaagccugucccaaggagugcuccagucucugcuuccccaguugcuguacugucggaaguuaagacucgauacaaaucaguuucaagacccggucauggaacugcuuggcucggugcugagcgggaaagauugcaggauccagaagaucucccuagcggagaaccagauuucaaauaaaggagccaaggcacucgcucguagucuguugguaaaccgcucucugacuagcuuagaccuccggggcaauuccauagguccucagggggccaaggcccuggcugaugcacuuaaaaucaacagaacccugacaucauugagccuccaaggaaauacugugagggacgauggcgcccgaucuauggcggaagcucuggccuccaaccggacccuaaguaugcugcaccuucagaagaacagcauugguccaaugggcgcacagcgcauggccgacgcucucaaacagaauagaucucugaaggaguugauguucuccucaaacaguaucggggauggaggcgcaaaagcccuggcggaagcguuaaagguuaaucaagggcucgagagccuggaccuucagucgaacuccauaucugaugccggagucgcagcccugaugggcgcuuuguguacaaaucagacccuccugagccuaucacugagggagaacaguauuucccccgaaggugcccaagcaaucgcucaugcccuuugcgcuaauucuacucucaagaaccuggacuugacggccaauuuacugcacgaucagggggcacgggcuaucgccguggcugugcgagagaacagaacacucaccagccugcaccuucaguggaauuuuauucaggcaggagccgcccaagcucugggccaggcguugcagcuaaaccgcucccugacuucacucgaccugcaggaaaaugcaaucggugacgauggcgccugugcugucgccagggcacuuaaaguuaacaccgccuuaacagcucuguaucuccaaguggcgagcauuggggccaguggagcacagguguugggcgaggcucuggccguaaaucguacccucgaaauacuggaccuucgggggaacgcaaucggagucgccggcgcuaaggcccuggcgaacgcauugaaaguuaauucuucccuaagaaggcugaaccuccaggagaauagcuuagguauggauggggccauuugcaucgcuacugcccugucgggaaaccaucgccuucagcacaucaaucugcaaggcaaccauauuggugacucaggcgcucgaaugauaucugaggcaaucaagacaaaugccccuacguguaccguugaaauguga

SEQ ID NO: 9177 - RNA, 3339 nt, Artificial Sequence
  derived and/or modified sequence opt4 from NOD3__Homo_sapiens__EAW85351
auggagauggacgcccccagaccccccagccuggccgugcccggcgccgccagcagacccggcagacugcuggacggcggccacggcagacagcaggugcaggcccugagcagccagcugcuggaggugauccccgacagcaugagaaagcaggaggugagaaccggcagagaggccggccagggccacggcaccggcagccccgccgagcaggugaaggcccugauggaccugcuggccggcaagggcagccagggcagccaggccccccaggcccuggacagaacccccgacgccccccugggccccugcagcaacgacagcagaauccagagacacagaaaggcccugcugagcaaggugggcggcggccccgagcugggcggccccuggcacagacuggccagccugcugcugguggagggccugaccgaccugcagcugagagagcacgacuucacccagguggaggccaccagaggcggcggccaccccgccagaaccguggcccuggacagacuguuccugccccugagcagagugagcgugccccccagagugagcaucaccaucggcguggccggcaugggcaagaccacccuggugagacacuucgugagacugugggcccacggccaggugggcaaggacuucagccuggugcugccccugaccuucagagaccugaacacccacgagaagcugugcgccgacagacugaucugcagcguguucccccacgugggcgagcccagccuggccguggccgugcccgccagagcccugcugauccuggacggccuggacgagugcagaaccccccuggacuucagcaacaccguggccugcaccgaccccaagaaggagauccccguggaccaccugaucaccaacaucaucagaggcaaccuguuccccgaggugagcaucuggaucaccagcagacccagcgccagcggccagauccccggcggccugguggacagaaugaccgagaucagaggcuucaacgaggaggagaucaaggugugccuggagcagauguuccccgaggaccaggcccugcugggcuggaugcugagccaggugcaggccgacagagcccuguaccugaugugcaccgugcccgccuucugcagacugaccggcauggcccugggccaccuguggagaagcagaaccggcccccaggacgccgagcuguggccccccagaacccugugcgagcuguacagcugguacuucagaauggcccugagcggcgagggccaggagaagggcaaggccagccccagaaucgagcagguggcccacggcggcagaaagauggugggcacccugggcagacuggccuuccacggccugcugaagaagaaguacguguucuacgagcaggacaugaaggccuucggcguggaccuggcccugcugcagggcgcccccugcagcugcuuccugcagagagaggagacccuggccagcagcguggccuacugcuucacccaccugagccugcaggaguucguggccgccgccuacuacuacggcgccagcagaagagccaucuucgaccuguucaccgagagcggcgugagcuggcccagacugggcuuccugacccacuucagaagcgccgcccagagagccaugcaggccgaggacggcagacuggacguguuccugagauuccugagcggccugcugagccccagagugaacgcccugcuggccggcagccugcuggcccagggcgagcaccaggccuacagaacccagguggccgagcugcugcagggcugccugagacccgacgccgccgugugcgccagagccaucaacgugcugcacugccugcacgagcugcagcacaccgagcuggccagaagcguggaggaggccauggagagcggcgcccuggccagacugaccggccccgcccacagagccgcccuggccuaccugcugcaggugagcgacgccugcgcccaggaggccaaccugagccugagccugagccagggcgugcugcagagccugcugccccagcugcuguacugcagaaagcugagacuggacaccaaccaguuccaggaccccgugauggagcugcugggcagcgugcugagcggcaaggacugcagaauccagaagaucagccuggccgagaaccagaucagcaacaagggcgccaaggcccuggccagaagccugcuggugaacagaagccugaccagccuggaccugagaggcaacagcaucggcccccagggcgccaaggcccuggccgacgcccugaagaucaacagaacccugaccagccugagccugcagggcaacaccgugagagacgacggcgccagaagcauggccgaggcccuggccagcaacagaacccugagcaugcugcaccugcagaagaacagcaucggccccaugggcgcccagagaauggccgacgcccugaagcagaacagaagccugaaggagcugauguucagcagcaacagcaucggcgacggcggcgccaaggcccuggccgaggcccugaaggugaaccagggccuggagagccuggaccugcagagcaacagcaucagcgacgccggcguggccgcccugaugggcgcccugugcaccaaccagacccugcugagccugagccugagagagaacagcaucagccccgagggcgcccaggccaucgcccacgcccugugcgccaacagcacccugaagaaccuggaccugaccgccaaccugcugcacgaccagggcgccagagccaucgccguggccgugagagagaacagaacccugaccagccugcaccugcaguggaacuucauccaggccggcgccgcccaggcccugggccaggcccugcagcugaacagaagccugaccagccuggaccugcaggagaacgccaucggcgacgacggcgccugcgccguggccagagcccugaaggugaacaccgcccugaccgcccuguaccugcagguggccagcaucggcgccagcggcgcccaggugcugggcgaggcccuggccgugaacagaacccuggagauccuggaccugagaggcaacgccaucggcguggccggcgccaaggcccuggccaacgcccugaaggugaacagcagccugagaagacugaaccugcaggagaacagccugggcauggacggcgccaucugcaucgccaccgcccugagcggcaaccacagacugcagcacaucaaccugcagggcaaccacaucggcgacagcggcgccagaaugaucagcgaggccaucaagaccaacgcccccaccugcaccguggagauguga

SEQ ID NO: 9178 - RNA, 3339 nt, Artificial Sequence
  derived and/or modified sequence opt5 from NOD3__Homo_sapiens__EAW85351
auggagauggacgcccccagaccuccgagccuggcugugcccggcgccgcgucccggccugggcgccuccuggauggaggccacgggagacagcaaguccaggcucuuucuagccagcugcucgaaguuauccccgacuccaugcggaagcaggaggugcgcaccggaagagaagccggccaagggcauggaacaggcucuccugccgaacaggugaaagcucugauggaucuucuggccggcaaggggagccagggaucccaggcuccccaagcccucgaccggacgccugaugcgccgcugggccccugcucuaacgacagccgcauucagagacaccggaaagcccugcucuccaaggucgggggaggcccugagcuugggggacccuggcaucgccuugcuagccugcuccugguggagggccuuaccgaucugcagcucagagagcacgacuucacacagguugaagccacccggggcgggggacauccugcucgcacaguggcccuggauagacuguuucucccccugucucgggucuccgugccgccucgcguuagcaucaccauuggcguggcggggaugggaaaaacaacccuugucagacacuucgugcggcugugggcccacggccaaguggggaaggacuuuucucucguccugccccuuacguucagagaucugaauacccaugagaagcucugugcugaccgccugaucugcuccguuuuuccucacgugggagaacccagccuggccguggcuguccccgcccgggcccuccugauucuugauggccuggacgaguguagaacaccucucgacuucucuaacaccguggcuugcacagauccgaaaaaggagauccccguugaccaucugaucaccaauauuauccgcggcaaccuuuuuccugaaguguccauuuggaucacgagccggcccuccgcgucugggcagauuccuggaggccuggucgauagaaugacagagauccgcggguucaaugaagaggaaauuaaagugugucucgagcagauguuucccgaggaccaagcccugcugggauggaugcucagccagguucaggcugaucgggcccuguaccuuaugugcaccgugccggccuucuguagacugacaggcauggcucucgggcaccuguggcgcucccggaccggcccucaggacgccgaacuguggcccccuagaacccuuugcgagcucuauagcugguacuuucgcauggcgcugucuggagaaggccaagagaaggggaaagcuagcccccggaucgaacaggucgcccacggaggcagaaagaugguggggacacugggacggcucgccuuccauggccugcuuaagaaaaaguaugucuuuuacgagcaggauaugaaggcuuucgggguggaccuggcccuccugcagggcgcuccuuguuccugcuuccugcaacgcgaggaaacgcuugccucuagcguugcguauuguuuuacccaccucucccugcaggaguucguggccgcugccuacuauuacggagcuucuagacgggccaucuuugaucuguucacagaaagcggcgucuccuggcccagacucggguuucugacccauuuccgcagcgcggcccagcgggcuaugcaggccgaggacggaagacuugauguguuucugcgcuuccucucuggccugcuguccccgagaguuaacgcucugcucgccgggagccugcuggcccaaggagaacaccaggcuuaccggacacagguggcggagcuccugcagggcugccuucgcccugacgccgcugucugcgccagagccauuaaugugcugcauugucuccacgagcugcaacacaccgaacuggcucggucuguggaggaagccauggaguccggggcgcuugcucgccucacgggccccgcccauagagccgcucuggccuaucugcuccagguuagcgacgcgugcgcucaggaggccaaccugucccuuucucugagccaaggaguccuccagucccugcugccccagcuucuguacugucggaaacuccgccuggauacaaaucaguuucaagacccugugauggaacuccugggcucugugcuuagcgggaaagauugcagaauccagaagauuucccuggccgagaaccagaucagcaauaaaggagcuaaggcccucgcucggucucugcuggucaaccgcucccuuaccagccuggaccucagaggcaauucuauugggccgcagggagccaaggcgcuggccgaugcucucaaaaucaaccggacccugacaucccuuagccugcaaggcaauaccgugagagacgauggggcccgcucuauggcugaagcccucgccagcaaccggacacuguccaugcugcaccuucagaagaacagcaucggccccaugggagcucagagaauggcggacgcccugaaacagaaucgcucucucaaggagcugauguucuccagcaacuccauuggcgaugggggagcuaaagcccucgccgaagcucugaagguuaaucaaggccuugagucucuggaccugcagagcaacuccaucucugaugccgggguggcggcucucaugggagcccuguguacgaaucagacccuucugagccucucccugcgggagaacucuauuagcccugaaggcgcccaagcuaucgcccaugcgcucugcgcuaauuccacacugaagaaccuugaccugaccgccaaucugcuccacgaucagggcgccagagcuauugccgucgcugugcgcgagaaccggacacugaccagccuucaucugcaguggaauuuuauccaggccggggcggcccaagcucucggacaggcccugcagcucaacagaucucugacgucccuugaccugcaggaaaaugcuaucggcgacgauggggccugugccguugcucgcgcgcugaaagugaacaccgcccucacagcucuguaucuucaagucgccagcauuggagccucuggcgcucaggugcugggggaggcccucgcgguuaaucggacccuggaaauccucgaccugagaggaaacgcuauuggcguggccggcgccaaggcucuugccaacgcgcugaaagucaauuccagccugcggcgccucaaccugcaggaaaauucucuugggauggauggagccaucugcauugcuacagcccuguccggcaaccacagacuccagcacaucaaucugcaagggaaccauauuggagacagcggcgcucggaugaucuccgaggccaucaagaccaaugcucccacguguacaguggagauguga

SEQ ID NO: 9179 - protein, 1065 aa, Artificial Sequence; identical to SEQ ID NO: 9165
  NOD3__Homo_sapiens__Q7RTR2

SEQ ID NO: 9180 - RNA, 3198 nt, Artificial Sequence
  NOD3__Homo_sapiens__AAT48367
augaggaagcaagaggugcggacgggcagggaggccggccagggccacgguacgggcuccccagccgagcaggugaaagcccucauggaucugcuggcugggaagggcagucaaggcucccaggccccgcaggcccuggauaggacaccggaugccccgcuggggcccugcagcaaugacucaaggauacagaggcaccgcaaggcccugcugagcaaggugggagguggcccggagcugggcggacccuggcacaggcuggccucccuccugcugguggagggccugacggaccugcagcugagggaacacgacuucacacagguggaggccacccgcgggggcgggcaccccgccaggaccgucgcccuggaccggcucuuccugccucucucccgggugucugucccaccccgggucuccaucacuaucgggguggccggcaugggcaagaccacccuggugaggcacuucguccgccucugggcccaugggcaggucggcaaggacuucucgcuggugcugccucugaccuuccgggaucucaacacccacgagaagcugugugccgaccgacucaucugcucggucuucccgcacgucggggagcccagccuggcgguggcagucccagccagggcccuccugauccuggacggcuuggaugagugcaggacgccucuggacuucuccaacaccguggccugcacggacccaaagaaggagaucccgguggaccaccugaucaccaacaucauccguggcaaccucuuuccggaaguuuccaucuggaucaccucccgucccagugcaucuggccagaucccagggggccugguggaccggaugacggagauccggggcuuuaacgaggaggagaucaagguguguuuggagcagauguuccccgaggaccaggcccuucugggcuggaugcugagccaagugcaggcugacagggcccuguaccugaugugcaccgucccagccuucugcaggcucacggggauggcgcuaggccaccuguggcgcagcaggacggggccccaggaugcagagcuguggcccccgaggacccugugcgagcucuacucaugguacuuuaggauggcccucagcggggaggggcaggagaagggcaaggcaagcccucgcaucgagcagguggcccaugguggccgcaagaugguggggacauugggccgucuggccuuccaugggcugcucaagaagaaauacguguuuuacgagcaagacaugaaggcguuugguguagaccucgcucugcugcagggcgccccgugcagcugcuuccugcagagagaggagacguuggcaucgucaguggccuacugcuucacccaccugucccugcaggaguuuguggcagccgcguauuacuauggcgcauccaggagggccaucuucgaccucuucacugagagcggcguauccuggcccaggcugggcuuccucacgcauuucaggagcgcagcccagcgggccaugcaggcagaggacgggaggcuggacguguuccugcgcuuccucuccggccucuugucuccgagggucaaugcccuccuggccggcucccugcuggcccaaggcgagcaccaggccuaccggacccagguggcugagcuccugcagggcugccugcgccccgaugccgcagucugugcacgggccaucaacguguugcacugccugcaugagcugcagcacacugagcuggcccgcagcguggaggaggccauggagagcggggcccuggccaggcugaccggucccgcgcaccgcgcugcccuggccuaccuccugcagguguccgacgccugugcccaggaggccaaccugucccugagccucagccagggcguccuucagagccugcugccccagcugcucuacugccggaagcucaggcuggacaccaaccaguuccaggaccccgugauggagcugcugggcagcgugcugagugggaaggacugucgcauucagaagaucagcuuggcggagaaccagaucaguaacaaaggggccaaagcucuggccagaucccucuuggucaacagaagucugaccucucuggaccuccgcgguaacuccauuggaccacaaggggccaaggcgcuggcagacgcuuugaagaucaaccgcacccugaccucccugagccuccagggcaacaccguuagggaugauggugccagguccauggcugaggccuuggccuccaaccggacccucuccaugcugcaccugcagaagaacagcaucgggcccaugggagcccagcggauggcagaugccuugaagcagaacaggagucugaaagagcucauguucuccaguaauaguauuggugauggaggugccaaggcccuggcugaggcccugaaggugaaccagggccuggagagccuggaccugcagagcaauuccaucagugacgcaggaguggcagcacugaugggggcccucugcaccaaccagacccuccucagccucagccuucgagaaaacuccaucagucccgagggagcccaggccaucgcucaugcccucugcgccaacagcacccugaagaaccuggaccugacagccaaccuccuccacgaccagggugcccgggccaucgcaguggcagugagagaaaaccgcacccucaccucccuucaccugcaguggaacuucauccaggccggcgcugcccaggcccugggacaagcacuacagcucaacaggagccucaccagcuuagauuuacaggagaacgccaucggggaugacggagcgugugcgguggcccgugcacugaaggucaacacagcccucacugcucucuaucuccagguggccucaauuggugcuucaggcgcccaggugcuaggggaagccuuggcugugaacagaaccuuggagauucucgacuuaagaggaaaugccauugggguggcuggagccaaagcccuggcaaaugcucugaagguaaacucaagucuccggagacucaaucuucaagagaauucucuggggauggacggggcgauaugcauugccacagcacugucuggaaaccacaggcuccagcauaucaaucuccagggaaaccacauuggggacuccggggccaggaugaucucagaggccaucaagacaaaugcucccacgugcacuguugaaauguga

SEQ ID NO: 9181 - RNA, 3198 nt, Artificial Sequence; identical to SEQ ID NO: 9167
  derived and/or modified sequence opt1 from NOD3__Homo_sapiens__AAT48367

SEQ ID NO: 9182 - RNA, 3198 nt, Artificial Sequence; identical to SEQ ID NO: 9168
  derived and/or modified sequence opt2 from NOD3__Homo_sapiens__AAT48367

SEQ ID NO: 9183 - RNA, 3198 nt, Artificial Sequence; identical to SEQ ID NO: 9169
  derived and/or modified sequence opt3 from NOD3__Homo_sapiens__AAT48367

SEQ ID NO: 9184 - RNA, 3198 nt, Artificial Sequence; identical to SEQ ID NO: 9170
  derived and/or modified sequence opt4 from NOD3__Homo_sapiens__AAT48367

SEQ ID NO: 9185 - RNA, 3198 nt, Artificial Sequence; identical to SEQ ID NO: 9171
  derived and/or modified sequence opt5 from NOD3__Homo_sapiens__AAT48367

SEQ ID NO: 9186 - protein, 1044 aa, Artificial Sequence
  PI3K__Homo_sapiens__O00329
MPPGVDCPMEFWTKEENQSVVVDFLLPTGVYLNFPVSRNANLSTIKQLLWHRAQYEPLFHMLSGPEAYVFTCINQTAEQQELEDEQRRLCDVQPFLPVLRLVAREGDRVKKLINSQISLLIGKGLHEFDSLCDPEVNDFRAKMCQFCEEAAARRQQLGWEAWLQYSFPLQLEPSAQTWGPGTLRLPNRALLVNVKFEGSEESFTFQVSTKDVPLALMACALRKKATVFRQPLVEQPEDYTLQVNGRHEYLYGSYPLCQFQYICSCLHSGLTPHLTMVHSSSILAMRDEQSNPAPQVQKPRAKPPPIPAKKPSSVSLWSLEQPFRIELIQGSKVNADERMKLVVQAGLFHGNEMLCKTVSSSEVSVCSEPVWKQRLEFDINICDLPRMARLCFALYAVIEKAKKARSTKKKSKKADCPIAWANLMLFDYKDQLKTGERCLYMWPSVPDEKGELLNPTGTVRSNPNTDSAAALLICLPEVAPHPVYYPALEKILELGRHSECVHVTEEEQLQLREILERRGSGELYEHEKDLVWKLRHEVQEHFPEALARLLLVTKWNKHEDVAQMLYLLCSWPELPVLSALELLDFSFPDCHVGSFAIKSLRKLTDDELFQYLLQLVQVLKYESYLDCELTKFLLDRALANRKIGHFLFWHLRSEMHVPSVALRFGLILEAYCRGSTHHMKVLMKQGEALSKLKALNDFVKLSSQKTPKPQTKELMHLCMRQEAYLEALSHLQSPLDPSTLLAEVCVEQCTFMDSKMKPLWIMYSNEEAGSGGSVGIIFKNGDDLRQDMLTLQMIQLMDVLWKQEGLDLRMTPYGCLPTGDRTGLIEVVLRSDTIANIQLNKSNMAATAAFNKDALLNWLKSKNPGEALDRAIEEFTLSCAGYCVATYVLGIGDRHSDNIMIRESGQLFHIDFGHFLGNFKTKFGINRERVPFILTYDFVHVIQQGKTNNSEKFERFRGYCERAYTILRRHGLLFLHLFALMRAAGLPELSCSKDIQYLKDSLALGKTEEEALKHFRVKFNEALRESWKTKVNWLAHNVSKDNRQ

SEQ ID NO: 9187 - RNA, 3135 nt, Artificial Sequence
  PI3K__Homo_sapiens__AAI32920
augcccccugggguggacugccccauggaauucuggaccaaggaggagaaucagagcguugugguugacuuccugcugcccacaggggucuaccugaacuucccugugucccgcaaugccaaccucagcaccaucaagcagcugcuguggcaccgcgcccaguaugagccgcucuuccacaugcucaguggccccgaggccuauguguucaccugcaucaaccagacagcggagcagcaagagcuggaggacgagcaacggcgucugugugacgugcagcccuuccugcccguccugcgccugguggcccgugagggcgaccgcgugaagaagcucaucaacucacagaucagccuccucaucggcaaaggccuccacgaguuugacuccuugugcgacccagaagugaacgacuuucgcgccaagaugugccaauucugcgaggaggcggccgcccgccggcagcagcugggcugggaggccuggcugcaguacaguuucccccugcagcuggagcccucggcucaaaccugggggccugguacccugcggcucccgaaccgggcccuucuggucaacguuaaguuugagggcagcgaggagagcuucaccuuccagguguccaccaaggacgugccgcuggcgcugauggccugugcccugcggaagaaggccacaguguuccggcagccgcugguggagcagccggaagacuacacgcugcaggugaacggcaggcaugaguaccuguauggcagcuacccgcucugccaguuccaguacaucugcagcugccugcacaguggguugaccccucaccugaccaugguccauuccuccuccauccucgccaugcgggaugagcagagcaacccugccccccagguccagaaaccgcgugccaaaccaccucccauuccugcgaagaagccuuccucugugucccuguggucccuggagcagccguuccgcaucgagcucauccagggcagcaaagugaacgccgacgagcggaugaagcugguggugcaggccgggcuuuuccacggcaacgagaugcugugcaagacgguguccagcucggaggugagcgugugcucggagcccguguggaagcagcggcuggaguucgacaucaacaucugcgaccugccccgcauggcccgucucugcuuugcgcuguacgccgugaucgagaaagccaagaaggcucgcuccaccaagaagaaguccaagaaggcggacugccccauugccugggccaaccucaugcuguuugacuacaaggaccagcuuaagaccggggaacgcugccucuacauguggcccuccgucccagaugagaagggcgagcugcugaaccccacgggcacugugcgcaguaaccccaacacggauagcgccgcugcccugcucaucugccugcccgagguggccccgcaccccguguacuaccccgcccuggagaagaucuuggagcuggggcgacacagcgagugugugcaugucaccgaggaggagcagcugcagcugcgggaaauccuggagcggcgggggucuggggagcuguaugagcacgagaaggaccugguguggaagcugcggcaugaaguccaggagcacuucccggaggcgcuagcccggcugcugcuggucaccaaguggaacaagcaugaggauguggcccagaugcucuaccugcugugcuccuggccggagcugcccguccugagcgcccuggagcugcuagacuucagcuuccccgauugccacguaggcuccuucgccaucaagucgcugcggaaacugacggacgaugagcuguuccaguaccugcugcagcuggugcaggugcucaaguacgaguccuaccuggacugcgagcugaccaaauuccugcuggaccgggcccuggccaaccgcaagaucggccacuuccuuuucuggcaccuccgcuccgagaugcacgugccgucgguggcccugcgcuucggccucauccuggaggccuacugcaggggcagcacccaccacaugaaggugcugaugaagcagggggaagcacugagcaaacugaaggcccugaaugacuucgucaagcugagcucucagaagacccccaagccccagaccaaggagcugaugcacuugugcaugcggcaggaggccuaccuagaggcccucucccaccugcaguccccacucgaccccagcacccugcuggcugaagucugcguggagcagugcaccuucauggacuccaagaugaagccccuguggaucauguacagcaacgaggaggcaggcagcggcggcagcgugggcaucaucuuuaagaacggggaugaccuccggcaggacaugcugacccugcagaugauccagcucauggacguccuguggaagcaggaggggcuggaccugaggaugacccccuauggcugccuccccaccggggaccgcacaggccucauugaggugguacuccguucagacaccaucgccaacauccaacucaacaagagcaacauggcagccacagccgccuucaacaaggaugcccugcucaacuggcugaaguccaagaacccgggggaggcccuggaucgagccauugaggaguucacccucuccugugcuggcuauuguguggccacauaugugcugggcauuggcgaucggcacagcgacaacaucaugauccgagagagugggcagcuguuccacauugauuuuggccacuuucuggggaauuucaagaccaaguuuggaaucaaccgcgagcgugucccauucauccucaccuacgacuuuguccaugugauucagcaggggaagacuaauaauagugagaaauuugaacgguuccggggcuacugugaaagggccuacaccauccugcggcgccacgggcuucucuuccuccaccucuuugcccugaugcgggcggcaggccugccugagcucagcugcuccaaagacauccaguaucucaaggacucccuggcacuggggaaaacagaggaggaggcacugaagcacuuccgagugaaguuuaacgaagcccuccgugagagcuggaaaaccaaagugaacuggcuggcccacaacguguccaaagacaacaggcaguag

SEQ ID NO: 9188 - RNA, 3135 nt, Artificial Sequence
  derived and/or modified sequence opt1 from PI3K__Homo_sapiens__AAI32920
augcccccgggcguggacugccccauggaguucuggaccaaggaggagaaccagagcgucgugguggacuuccugcuccccaccggggucuaccugaacuuccccgugucccgcaacgccaaccugagcacgaucaagcagcuccuguggcaccgggcccaguacgagccgcuguuccacaugcucuccggccccgaggcguacguguucacgugcaucaaccagaccgccgagcagcaggagcuggaggacgagcagcgccggcugugcgacguccagcccuuccuccccgugcugcgccugguggcccgggagggggaccgcgucaagaagcucaucaacagccagaucucccugcugaucggcaaggggcuccacgaguucgacagccugugcgacccggaggugaacgacuuccgggccaagaugugccaguucugcgaggaggccgcggcccgccggcagcagcugggcugggaggccuggcuccaguacuccuucccccugcagcuggagcccagcgcccagaccuggggccccgggacccuccgccugccgaaccgggcgcugcucgugaacgucaaguucgagggcuccgaggagagcuucaccuuccagguguccaccaaggacgugccccuggcccugauggccugcgcccuccgcaagaaggccaccgucuuccggcagccccugguggagcagcccgaggacuacacgcuccaggugaacgggcgccacgaguaccucuacggcagcuacccgcugugccaguuccaguacaucugcuccugccugcacagcgggcucacgccccaccugaccaugguccacuccagcuccauccuggcgaugcgggacgagcagagcaaccccgcgccccaggugcagaagccgcgcgccaagcccccgcccauccccgccaagaagcccuccagcgugagccucuggucccuggagcagcccuuccggaucgagcugauccagggcagcaaggucaacgccgacgagcgcaugaagcucguggugcaggccggccuguuccacgggaacgagaugcugugcaagaccgucuccagcuccgaggugagcgucugcuccgagcccguguggaagcagcggcucgaguucgacaucaacaucugcgaccugccgcgcauggcccggcugugcuucgcccucuacgccgugaucgagaaggccaagaaggcgcgcagcaccaagaagaaguccaagaaggccgacugccccaucgccugggccaaccugaugcuguucgacuacaaggaccagcucaagaccggcgagcgcugccuguacauguggcccagcgucccggacgagaagggggagcugcugaaccccaccggcaccgugcgguccaaccccaacacggacagcgccgcggcccuccugaucugccugcccgagguggccccgcaccccgucuacuaccccgcccucgagaagauccuggagcugggccgccacuccgagugcgugcacgugaccgaggaggagcagcuccagcugcgggagauccuggagcgccgggggagcggcgagcucuacgagcacgagaaggaccuggucuggaagcugcgccacgaggugcaggagcacuuccccgaggcgcucgcccggcugcugcucgugaccaaguggaacaagcacgaggacgucgcccagaugcuguaccugcucugcuccuggccggagcugcccgugcugagcgcccucgagcugcuggacuucuccuuccccgacugccacguggggagcuucgccaucaagucccuccgcaagcugaccgacgacgagcuguuccaguaccuccugcagcugguccaggugcucaaguacgagagcuaccuggacugcgagcugacgaaguuccuccuggaccgggcgcuggccaaccgcaagaucggccacuuccucuucuggcaccuccggagcgagaugcacgugcccuccgucgcccugcgcuucgggcugauccuggaggccuacugccggggcagcacccaccacaugaaggugcugaugaagcagggcgaggcccucuccaagcugaaggcgcugaacgacuucgugaagcucagcucccagaagaccccgaagccccagaccaaggagcugaugcaccugugcaugcgccaggaggccuaccucgaggcccugagccaccuccagagcccccuggaccccuccacgcugcuggccgaggucugcguggagcagugcaccuucauggacuccaagaugaagccgcucuggaucauguacagcaacgaggaggccggguccggcgggagcgugggcaucaucuucaagaacggggacgaccugcggcaggacaugcugacccuccagaugauccagcugauggacguccuguggaagcaggagggccucgaccugcgcaugacccccuacggcugccugcccacgggggaccggaccggccucaucgagguggugcugcgcuccgacaccaucgcgaacauccagcugaacaagagcaacauggccgccaccgccgcguucaacaaggacgcccuccugaacuggcugaaguccaagaaccccggggaggcccucgaccgggccaucgaggaguucacgcugagcugcgccggcuacugcgucgcgaccuacgugcuggggaucggcgaccgccacuccgacaacaucaugauccgcgagagcggccagcuguuccacaucgacuucgggcacuuccugggcaacuucaagaccaaguucgggaucaaccgggagcgcgugccguucauccugaccuacgacuucguccacgugauccagcagggcaagacgaacaacagcgagaaguucgagcgguuccgcggcuacugcgagcgggccuacaccauccuccgccggcacgggcugcuguuccuccaccuguucgcccugaugcgcgccgccggccuccccgagcuguccugcagcaaggacauccaguaccugaaggacucccucgcgcuggggaagaccgaggaggaggcccugaagcacuuccgggugaaguucaacgaggcccuccgcgagagcuggaagaccaaggucaacuggcuggcccacaacguguccaaggacaaccggcaguga

SEQ ID NO: 9189 - RNA, 3135 nt, Artificial Sequence
  derived and/or modified sequence opt2 from PI3K__Homo_sapiens__AAI32920
augccccccggcgucgacugccccauggaguucuggaccaaggaggagaaccaguccgucgucgucgacuuccuccuccccaccggcgucuaccucaacuuccccgucucccgcaacgccaaccucuccaccaucaagcagcuccucuggcaccgcgcccaguacgagccccucuuccacaugcucuccggccccgaggccuacgucuucaccugcaucaaccagaccgccgagcagcaggagcucgaggacgagcagcgccgccucugcgacguccagcccuuccuccccguccuccgccucgucgcccgcgagggcgaccgcgucaagaagcucaucaacucccagaucucccuccucaucggcaagggccuccacgaguucgacucccucugcgaccccgaggucaacgacuuccgcgccaagaugugccaguucugcgaggaggccgccgcccgccgccagcagcucggcugggaggccuggcuccaguacuccuucccccuccagcucgagcccuccgcccagaccuggggccccggcacccuccgccuccccaaccgcgcccuccucgucaacgucaaguucgagggcuccgaggaguccuucaccuuccaggucuccaccaaggacgucccccucgcccucauggccugcgcccuccgcaagaaggccaccgucuuccgccagccccucgucgagcagcccgaggacuacacccuccaggucaacggccgccacgaguaccucuacggcuccuacccccucugccaguuccaguacaucugcuccugccuccacuccggccucaccccccaccucaccaugguccacuccuccuccauccucgccaugcgcgacgagcaguccaaccccgccccccagguccagaagccccgcgccaagcccccccccauccccgccaagaagcccuccuccgucucccucuggucccucgagcagcccuuccgcaucgagcucauccagggcuccaaggucaacgccgacgagcgcaugaagcucgucguccaggccggccucuuccacggcaacgagaugcucugcaagaccgucuccuccuccgaggucuccgucugcuccgagcccgucuggaagcagcgccucgaguucgacaucaacaucugcgaccucccccgcauggcccgccucugcuucgcccucuacgccgucaucgagaaggccaagaaggcccgcuccaccaagaagaaguccaagaaggccgacugccccaucgccugggccaaccucaugcucuucgacuacaaggaccagcucaagaccggcgagcgcugccucuacauguggcccuccguccccgacgagaagggcgagcuccucaaccccaccggcaccguccgcuccaaccccaacaccgacuccgccgccgcccuccucaucugccuccccgaggucgccccccaccccgucuacuaccccgcccucgagaagauccucgagcucggccgccacuccgagugcguccacgucaccgaggaggagcagcuccagcuccgcgagauccucgagcgccgcggcuccggcgagcucuacgagcacgagaaggaccucgucuggaagcuccgccacgagguccaggagcacuuccccgaggcccucgcccgccuccuccucgucaccaaguggaacaagcacgaggacgucgcccagaugcucuaccuccucugcuccuggcccgagcuccccguccucuccgcccucgagcuccucgacuucuccuuccccgacugccacgucggcuccuucgccaucaagucccuccgcaagcucaccgacgacgagcucuuccaguaccuccuccagcucguccagguccucaaguacgaguccuaccucgacugcgagcucaccaaguuccuccucgaccgcgcccucgccaaccgcaagaucggccacuuccucuucuggcaccuccgcuccgagaugcacguccccuccgucgcccuccgcuucggccucauccucgaggccuacugccgcggcuccacccaccacaugaagguccucaugaagcagggcgaggcccucuccaagcucaaggcccucaacgacuucgucaagcucuccucccagaagacccccaagccccagaccaaggagcucaugcaccucugcaugcgccaggaggccuaccucgaggcccucucccaccuccaguccccccucgaccccuccacccuccucgccgaggucugcgucgagcagugcaccuucauggacuccaagaugaagccccucuggaucauguacuccaacgaggaggccggcuccggcggcuccgucggcaucaucuucaagaacggcgacgaccuccgccaggacaugcucacccuccagaugauccagcucauggacguccucuggaagcaggagggccucgaccuccgcaugacccccuacggcugccuccccaccggcgaccgcaccggccucaucgaggucguccuccgcuccgacaccaucgccaacauccagcucaacaaguccaacauggccgccaccgccgccuucaacaaggacgcccuccucaacuggcucaaguccaagaaccccggcgaggcccucgaccgcgccaucgaggaguucacccucuccugcgccggcuacugcgucgccaccuacguccucggcaucggcgaccgccacuccgacaacaucaugauccgcgaguccggccagcucuuccacaucgacuucggccacuuccucggcaacuucaagaccaaguucggcaucaaccgcgagcgcguccccuucauccucaccuacgacuucguccacgucauccagcagggcaagaccaacaacuccgagaaguucgagcgcuuccgcggcuacugcgagcgcgccuacaccauccuccgccgccacggccuccucuuccuccaccucuucgcccucaugcgcgccgccggccuccccgagcucuccugcuccaaggacauccaguaccucaaggacucccucgcccucggcaagaccgaggaggaggcccucaagcacuuccgcgucaaguucaacgaggcccuccgcgaguccuggaagaccaaggucaacuggcucgcccacaacgucuccaaggacaaccgccaguga

SEQ ID NO: 9190 - RNA, 3135 nt, Artificial Sequence
  derived and/or modified sequence opt3 from PI3K__Homo_sapiens__AAI32920
augcccccuggcguggacugcccaauggaguucuggaccaaggaagagaaccagagcgucguuguggauuuucugcucccgacagggguauaccuuaauuuccccguguccagaaacgccaaucugucuacuaucaaacaauuguuauggcacagggcucaguaugaaccucuguuucauaugcuaucaggaccagaggcauacgucuucacguguauuaaccagaccgccgaacagcaagagcucgaggacgaacagcggcgccugugcgaugugcagcccuuucuuccuguucugcgauugguggcgcgugagggugacagagucaagaaacucauaaauagucagaucagccugcugauuggcaaggggcuccacgaguucgauuccuuaugugacccagaggugaacgauuuuagggcuaaaaugugccaauucugugaggaagccgcagcccggcgccagcagcugggaugggaggcuuggcuucaguauucuuuucccuugcaacuggaaccuucggcacagacauggggcccagguacucuaagacucccgaauagggcccugcuuguaaacguuaaguucgaggggucagaagagagcuuuaccuuccaggugaguacaaaggacgucccccuggcuuugauggccugcgcgcuccggaaaaaggcaaccguguuucgccaaccucugguggagcagccagaagauuacacuuuacaggucaauggacgacaugaguaucuguacggcuccuauccccucugucaguuccaauacaucugcucuugucuucacagcggccugacaccucauuugaccaugguucacuccucaaguauucuagccaugagagacgaacagagcaacccagcuccccaggugcagaaaccgagggccaagccucccccaaucccugcuaaaaagcccucuuccguaucacuguggagccucgagcaaccauuccggauagaacugauccaggggaguaaggugaaugcagaugagcguaugaaacuugucgugcaggccggacuguuucacgguaacgagauguugugcaagacgguuucuuccagcgaagugucggucuguucugagcccguguggaaacagcgccucgaguucgacauuaauaucugcgaucugccuagaauggcgagguuaugcuuugcccuguacgcaguaauugaaaaggcuaaaaaggcccgguccacuaaaaagaagaguaaaaaggcugacuguccaaucgccugggcaaaccuaaugcuguucgacuauaaagaucaacucaagaccggcgaacgaugccuuuacauguggccgucaguucccgacgagaaaggggaguugcugaauccuacaggaacugugcgcagcaacccaaacaccgauuccgccgcugcgcuccugauaugucuucccgaagucgcaccucauccaguguauuaccccgcccuggagaagauuuuggaacucggcagacacucugagugcguccaugugacagaggaagaacagcugcaguuaagggaaauccuggagcggcgcgguagcggggaacuauaugagcacgagaaggaccucguuuggaaacugagacacgaagugcaggagcauuuuccggaagcucuugccagguugcugcucguaaccaaguggaauaaacacgaggaugucgcacaaaugcuguacuuacuguguucauggccugaacuuccaguguugagugcccucgagcugcuagacuucuccuuucccgauugccauguuggcagcuucgcuauuaagucucugcguaaacucacggacgaugagcuguuucaguaucuuuugcagcuggugcaagucuuaaaguacgaaucauaccucgacugugagcugacuaaguuccuucuggaucgggccuuggcaaaccgaaaaaucggacacuuucucuucuggcaucugagaagugaaaugcacgugccuagcguagcgcuaagguuuggccugauccucgaggcuuauugccgcggguccacacaccauaugaaggugcugaugaaacagggagaagcccuuucuaaguugaaagcacugaaugacuucguuaaguuaucgagccagaagacccccaaaccacagacuaaggagcucaugcaccuguguaugcggcaagaggccuaccuugaagcucugucccaucuacagucaccucucgaccccaguacacuguuggccgaggucugcguggaacaguguaccuucauggauucuaaaaugaagccacuguggauuauguauagcaacgaggaggcagguuccggcgggucagugggaauaaucuuuaaaaauggcgacgauuuaagacaggacaugcucacgcugcaaaugauucagcuuauggauguccuguggaagcaggaagguuuggaccucaggaugaccccguacgggugccugccuacaggcgaucgcacuggacuaaucgagguugugcugcgaagcgacaccauagcuaacauucagcuuaauaaaucuaacauggccgcgacagccgcuuucaauaaggaugcacuccugaacugguugaaguccaaaaaucccggcgaagcccuggaccgggcuaucgaggaauuuacuuuaaguugcgccggguauuguguggcaaccuacguacucggaaucggugaucgucacagcgacaacauuaugaucagagagucuggccaacuguuccacauugauuuugggcauuuccuuggaaauuuuaagacaaaauucggcauaaacagggagcgcgucccauuuauccugaccuaugacuucgugcacguuauucagcaggguaagacuaauaacuccgaaaaauuugagcgguucagaggguacugcgaaagggcguacacgaucuugcgacgccauggccuccuguuucuacaccuguucgcccuuaugcgggcugccggacuccccgagcugucauguaguaaggacauccaauauuugaaggauagcuuagcacugggcaaaacagaagaggaggcucucaagcauuucagagugaaauuuaacgaagcccugagggagucguggaagaccaaagucaauuggcuugcacacaacguguccaaggacaaucgucaguga

SEQ ID NO: 9191 - RNA, 3135 nt, Artificial Sequence
  derived and/or modified sequence opt4 from PI3K__Homo_sapiens__AAI32920
augccccccggcguggacugccccauggaguucuggaccaaggaggagaaccagagcguggugguggacuuccugcugcccaccggcguguaccugaacuuccccgugagcagaaacgccaaccugagcaccaucaagcagcugcuguggcacagagcccaguacgagccccuguuccacaugcugagcggccccgaggccuacguguucaccugcaucaaccagaccgccgagcagcaggagcuggaggacgagcagagaagacugugcgacgugcagcccuuccugcccgugcugagacugguggccagagagggcgacagagugaagaagcugaucaacagccagaucagccugcugaucggcaagggccugcacgaguucgacagccugugcgaccccgaggugaacgacuucagagccaagaugugccaguucugcgaggaggccgccgccagaagacagcagcugggcugggaggccuggcugcaguacagcuucccccugcagcuggagcccagcgcccagaccuggggccccggcacccugagacugcccaacagagcccugcuggugaacgugaaguucgagggcagcgaggagagcuucaccuuccaggugagcaccaaggacgugccccuggcccugauggccugcgcccugagaaagaaggccaccguguucagacagccccugguggagcagcccgaggacuacacccugcaggugaacggcagacacgaguaccuguacggcagcuacccccugugccaguuccaguacaucugcagcugccugcacagcggccugaccccccaccugaccauggugcacagcagcagcauccuggccaugagagacgagcagagcaaccccgccccccaggugcagaagcccagagccaagcccccccccauccccgccaagaagcccagcagcgugagccuguggagccuggagcagcccuucagaaucgagcugauccagggcagcaaggugaacgccgacgagagaaugaagcugguggugcaggccggccuguuccacggcaacgagaugcugugcaagaccgugagcagcagcgaggugagcgugugcagcgagcccguguggaagcagagacuggaguucgacaucaacaucugcgaccugcccagaauggccagacugugcuucgcccuguacgccgugaucgagaaggccaagaaggccagaagcaccaagaagaagagcaagaaggccgacugccccaucgccugggccaaccugaugcuguucgacuacaaggaccagcugaagaccggcgagagaugccuguacauguggcccagcgugcccgacgagaagggcgagcugcugaaccccaccggcaccgugagaagcaaccccaacaccgacagcgccgccgcccugcugaucugccugcccgagguggccccccaccccguguacuaccccgcccuggagaagauccuggagcugggcagacacagcgagugcgugcacgugaccgaggaggagcagcugcagcugagagagauccuggagagaagaggcagcggcgagcuguacgagcacgagaaggaccugguguggaagcugagacacgaggugcaggagcacuuccccgaggcccuggccagacugcugcuggugaccaaguggaacaagcacgaggacguggcccagaugcuguaccugcugugcagcuggcccgagcugcccgugcugagcgcccuggagcugcuggacuucagcuuccccgacugccacgugggcagcuucgccaucaagagccugagaaagcugaccgacgacgagcuguuccaguaccugcugcagcuggugcaggugcugaaguacgagagcuaccuggacugcgagcugaccaaguuccugcuggacagagcccuggccaacagaaagaucggccacuuccuguucuggcaccugagaagcgagaugcacgugcccagcguggcccugagauucggccugauccuggaggccuacugcagaggcagcacccaccacaugaaggugcugaugaagcagggcgaggcccugagcaagcugaaggcccugaacgacuucgugaagcugagcagccagaagacccccaagccccagaccaaggagcugaugcaccugugcaugagacaggaggccuaccuggaggcccugagccaccugcagagcccccuggaccccagcacccugcuggccgaggugugcguggagcagugcaccuucauggacagcaagaugaagccccuguggaucauguacagcaacgaggaggccggcagcggcggcagcgugggcaucaucuucaagaacggcgacgaccugagacaggacaugcugacccugcagaugauccagcugauggacgugcuguggaagcaggagggccuggaccugagaaugacccccuacggcugccugcccaccggcgacagaaccggccugaucgagguggugcugagaagcgacaccaucgccaacauccagcugaacaagagcaacauggccgccaccgccgccuucaacaaggacgcccugcugaacuggcugaagagcaagaaccccggcgaggcccuggacagagccaucgaggaguucacccugagcugcgccggcuacugcguggccaccuacgugcugggcaucggcgacagacacagcgacaacaucaugaucagagagagcggccagcuguuccacaucgacuucggccacuuccugggcaacuucaagaccaaguucggcaucaacagagagagagugcccuucauccugaccuacgacuucgugcacgugauccagcagggcaagaccaacaacagcgagaaguucgagagauucagaggcuacugcgagagagccuacaccauccugagaagacacggccugcuguuccugcaccuguucgcccugaugagagccgccggccugcccgagcugagcugcagcaaggacauccaguaccugaaggacagccuggcccugggcaagaccgaggaggaggcccugaagcacuucagagugaaguucaacgaggcccugagagagagcuggaagaccaaggugaacuggcuggcccacaacgugagcaaggacaacagacaguga

SEQ ID NO: 9192 - RNA, 3135 nt, Artificial Sequence
  derived and/or modified sequence opt5 from PI3K__Homo_sapiens__AAI32920
augcccccuggcguggacugcccgauggaguucuggaccaaggaagagaaccagagcgucguuguggauuuucugcuccccacagggguguaccugaauuucccugucuccagaaacgccaaucuuucuacgaucaaacaacugcucuggcaccgggcucaguaugaaccccuguuucauaugcuuagcggaccugaggccuacguguucaccuguauuaaccagacagcggaacagcaagagcuggaggacgaacagcgcagacucugcgauguucagcccuuucugccugugcugcggcucgucgcucgcgagggcgacagagugaagaaacugaucaauucccagauuucucuucugaucgggaagggacuccacgaguucgauagccugugugacccggagguuaacgauuuucgggccaaaaugugccaauucugugaggaagccgcugcccgcagacagcagcuuggcugggaggcuuggcugcaguauuccuuuccccuccaacuggaaccuucugcccagaccugggggcccggaacacugcggcucccuaaucgcgcgcugcuugugaacgucaaguucgagggcagcgaagaguccuuuaccuuccaggugagcacaaaggacgugccccuggcccucauggcuugcgcccugagaaagaaggcuaccgucuuucggcaaccgcuuguugagcagccugaagauuacacgcuccaggugaauggccgccaugaguaucuguacgggucuuauccccugugucaguuccaauacauuugcuccugucugcacagcggacucaccccucaucugacaauggugcacucuuccagcauccuugccaugagagacgaacagucuaaccccgcgccccagguccagaaaccucgggccaagccgcccccuauccccgcuaaaaagccuuccagcgugucccuguggucucucgagcaacccuuccgcauugaacugauccagggcagcaagguuaaugccgaugagagaaugaaacuugugguccaggcugggcuguuucacggaaacgagaugcucugcaagaccguguccagcucugaaguuuccguguguagcgagccggucuggaaacagcggcuggaguucgacauuaauaucugcgaucugccuagaauggcccgccucugcuuugcccuguacgcugugauugaaaaggcgaaaaaggcccggucuacaaagaaaaagagcaaaaaggcugacugucccaucgccugggccaaccuuaugcuguucgacuauaaagaucaacucaagaccggcgaaagaugccuguacauguggccuuccguccccgacgagaaaggggagcugcuuaauccuacgggaacagugcgcucuaaccccaacaccgauagcgcugccgcgcuccugauuugucugccggaaguugcuccucaucccguguauuaccccgcccucgagaagauccuggaacuuggccggcacuccgagugcguccaugugacagaggaagaacagcugcagcucagagaaauccuggagcgccggggcagcggggaacuguaugagcacgagaaggaccuuguuuggaaacucagacacgaagugcaggagcauuuuccugaagcccuggcucgccugcuccuggucaccaaguggaauaaacacgaggauguggcccaaaugcuuuaccugcucuguucuuggccggaacugcccgugcuguccgcucuugagcuccuggacuucagcuuuccugauugccauguuggaucuuucgccauuaagucccugcggaaacucaccgacgaugagcuguuucaguaucuucugcagcucguccaagugcugaaguacgaaagcuaccuggacugugagcuuacaaaguuccuccuggauagagcgcuggccaaccgcaaaaucggccacuuucucuucuggcaucugcgguccgaaaugcacgugcccucugucgcucuuagauuugggcugauucucgaggccuauugccggggaagcacgcaccauaugaaggugcugaugaaacagggcgaagcucuguccaaacuuaaagcccugaaugacuucguuaagcucucuagccagaagaccccuaaaccccagacaaaggagcugaugcaccucuguaugcgccaagaggcguaccuggaagcccuuucccaucugcagagcccucucgaccccucuacccugcuggcugaggugugcgucgaacaguguacauucauggauuccaaaaugaagccgcuuuggaucauguauagcaacgaggaggccgggucuggaggcuccgugggcauuaucuuuaaaaauggggacgaucugagacaggacaugcucacccugcaaaugauccagcucauggauguucuguggaagcaggaaggacuugaccugcggaugacgccuuacggcugccuccccacaggggauagaaccggacugauugaggugguccugcgcagcgacaccaucgcuaacauucagcuuaauaaaucuaacauggccgccacagcugcguucaauaaggaugcccugcucaacuggcucaagagcaaaaauccuggcgaagcucuggaccgggccaucgaggaauuuacccuguccugcgccggguauuguguggcuacauacguucuuggcauuggagauagacacagcgacaacaucaugauccgcgagucuggccaacuguuccacauugauuuugggcauuuccugggaaauuuuaagacgaaauucggcaucaacagagagcgggugcccuuuauucucaccuaugacuucguccacgugauccagcaggggaagacaaauaacuccgaaaaauuugagcgcuucagaggauacugcgaacgggccuacaccauucugcgcagacauggccuucuguuucuccaccuguucgcgcucaugcgggcugccgggcugccggagcuuagcuguuccaaggacauccaauaucugaaggauucucuggcccucggcaaaacagaagaggaggcucugaagcauuuccgcgugaaauuuaacgaagcccuuagagagagcuggaagaccaaagucaauuggcuggcgcacaacguuuccaaggacaaucggcaguga

SEQ ID NO: 9193 - protein, 728 aa, Artificial Sequence
  PI3K__Homo_sapiens__O00459
MAGPEGFQYRALYPFRRERPEDLELLPGDVLVVSRAALQALGVAEGGERCPQSVGWMPGLNERTRQRGDFPGTYVEFLGPVALARPGPRPRGPRPLPARPRDGAPEPGLTLPDLPEQFSPPDVAPPLLVKLVEAIERTGLDSESHYRPELPAPRTDWSLSDVDQWDTAALADGIKSFLLALPAPLVTPEASAEARRALREAAGPVGPALEPPTLPLHRALTLRFLLQHLGRVASRAPALGPAVRALGATFGPLLLRAPPPPSSPPPGGAPDGSEPSPDFPALLVEKLLQEHLEEQEVAPPALPPKPPKAKPASTVLANGGSPPSLQDAEWYWGDISREEVNEKLRDTPDGTFLVRDASSKIQGEYTLTLRKGGNNKLIKVFHRDGHYGFSEPLTFCSVVDLINHYRHESLAQYNAKLDTRLLYPVSKYQQDQIVKEDSVEAVGAQLKVYHQQYQDKSREYDQLYEEYTRTSQELQMKRTAIEAFNETIKIFEEQGQTQEKCSKEYLERFRREGNEKEMQRILLNSERLKSRIAEIHESRTKLEQQLRAQASDNREIDKRMNSLKPDLMQLRKIRDQYLVWLTQKGARQKKINEWLGIKNETEDQYALMEDEDDLPHHEERTWYVGKINRTQAEEMLSGKRDGTFLIRESSQRGCYACSVVVDGDTKHCVIYRTATGFGFAEPYNLYGSLKELVLHYQHASLVQHNDALTVTLAHPVRAPGPGPPPAAR

SEQ ID NO: 9194 - RNA, 2187 nt, Artificial Sequence
  PI3K__Homo_sapiens__AAD22671
auggcgggcccugagggcuuccaguaccgcgcucuguacccguuccgccgggagcggccggaggaccuggagcugcugcccggcgacgugcugguagugagccgggcggccuugcaggcgcugggcguggccgaggguggcgagcgcugcccacagagcgugggcuggaugcccggccucaacgagcgcacacggcagcgaggugacuucccuggcaccuauguggaguuccuggggcccguggcccuggcccggcccggcccucgcccacggggcccccgcccacugcccgccaggccccgugauggggccccugagccaggccucacacuccccgacuugcccgagcaguucuccccaccugauguggcucccccucuucuggugaagcuuguggaggccauugaaaggacagggcuggacagcgaaucucacuaccgcccggagcugcccgcaccgcguacagacuggucccugagcgacguggaucagugggacacggcagcccuggcugacggcauuaagagcuuccugcuggcacugcccgcgccgcucgugacccccgaggccucggccgaggcgcgccgggcccugcgggaggccgcggggcccguggggccggcgcuggagccaccgacgcugccgcugcaccgcgcgcucacgcugcgcuuccugcuccagcaccugggccgcguggccagccgcgccccggcccugggucccgcgguccgggcccugggcgccaccuuugggccgcugcugcugcgcgcgccgccgccgccguccucgccgccgccagggggcgcucccgacgggagugagcccagcccugacuucccggcgcugcugguggagaagcugcuucaggaacacuuggaagagcaggagguugcgcccccagcgcugccgccuaaaccccccaaggcaaagccggccuccacaguccuggccaauggagggagcccacccucccugcaggaugcugagugguacuggggggacauuucaagggaggaggugaacgagaaacuccgggacacucccgauggcaccuuccuaguccgagaugcuucuagcaagauccagggcgaguacacgcugacccucaggaaaggcgggaacaauaagcugaucaaggucuuccaccgagaugggcacuauggcuucucagagccacucaccuucugcuccguuguggaccucaucaaucacuaccgccacgagucucuggcccaguacaaugccaagcuggacacacggcuccucuacccuguguccaaauaccagcaggaccagauugucaaggaggacagcguggaggcagugggcgcccagcuuaaggucuaucaccagcaguaccaggacaagagccgcgaguaugaccagcuuuaugaagaguacacacggaccucccaggagcugcagaugaagcguacugcaauugaggccuucaaugagacuaucaagaucuuugaagagcagggccagacucaagagaaaugcagcaaggaauaccuggagcgcuuccggcgugagggcaacgagaaagagaugcaaaggauccugcugaacuccgagcggcucaagucccgcauugccgagauccaugagagccgcacgaagcuggagcagcagcugcgggcccaggccucggacaacagagagaucgacaagcgcaugaacagccucaagccggaccucaugcagcugcgcaagauccgagaccaguaccucguguggcucacccagaaaggcgcccggcagaagaaaaucaacgaguggcuggggauuaaaaaugagacugaggaccaguacgcacucauggaggacgaggacgaucucccgcaccacgaggaacgcacuugguacgugggcaagaucaaccgcacgcaggcagaggagaugcugaguggcaagcgggauggcaccuuccucauccgcgagagcagccagcggggcugcuacgccugcuccgugguaguggacggcgacaccaagcacugcgucaucuaccgcacggccaccggcuucggcuucgcggagcccuacaaccuguacgggucgcugaaggagcuggugcugcacuaccagcacgccucgcuggugcagcacaacgacgcgcucaccgucacccuggcgcacccagugcgcgccccgggccccggcccgccgccugccgcccgcuga

SEQ ID NO: 9195 - RNA, 2187 nt, Artificial Sequence
  derived and/or modified sequence opt1 from PI3K__Homo_sapiens__AAD22671
auggccggccccgagggguuccaguaccgcgcccuguacccguuccggcgcgagcggcccgaggaccucgagcugcugcccggcgacgugcucgucgugagccgcgcggcccugcaggcccuggggguggccgagggcggggagcggugcccccaguccgucggcuggaugccgggccucaacgagcgcacccggcagcgcggggacuuccccggcaccuacguggaguuccuggggcccguggcccuggcgcggcccggcccgcgcccccgggggccccgcccccucccggcccggccccgcgacggcgcccccgagcccggccugacgcugccggaccuccccgagcaguucagcccccccgacgucgccccgccccugcuggugaagcucguggaggcgaucgagcggaccgggcuggacuccgagagccacuaccgccccgagcugcccgccccgcggaccgacuggucccucagcgacgucgaccagugggacaccgccgcccuggccgacggcaucaaguccuuccugcucgcgcugcccgccccccuggugacgcccgaggccagcgccgaggcccgccgggcgcuccgcgaggccgccgggccggugggccccgcccuggagcccccgacccugccccuccaccgggcccugacccugcgcuuccuccugcagcaccugggccgcgucgcgucccgggcccccgcccucgggcccgccgugcgcgcccugggcgcgaccuucgggccgcugcuccugcgggcccccccccccccgagcucccccccccccggcggggccccggacggcagcgagcccucccccgacuuccccgcccugcucguggagaagcugcugcaggagcaccucgaggagcaggaggucgcgccgcccgcccugccccccaagccgcccaaggccaagcccgccagcacggugcuggccaacggcgggucccccccgagccuccaggacgcggagugguacuggggcgacaucucccgcgaggaggugaacgagaagcugcgggacacccccgacgggaccuuccugguccgcgacgccagcuccaagauccagggcgaguacacccucacgcugcggaaggggggcaacaacaagcugaucaagguguuccaccgcgacggccacuacggguucagcgagccccugaccuucugcagcguggucgaccucaucaaccacuaccggcacgagucccuggcccaguacaacgccaagcuggacacccgccuccuguacccggugagcaaguaccagcaggaccagaucgugaaggaggacuccgucgaggccgugggcgcgcagcugaaggucuaccaccagcaguaccaggacaagagccgggaguacgaccagcucuacgaggaguacacccgcacgucccaggagcugcagaugaagcggaccgccaucgaggccuucaacgagaccaucaagaucuucgaggagcaggggcagacccaggagaagugcagcaaggaguaccuggagcgcuuccggcgcgagggcaacgagaaggagaugcagcggauccuccugaacuccgagcgccugaagagccggaucgccgagauccacgagucccgcacgaagcucgagcagcagcugcgcgcccaggcgagcgacaaccgggagaucgacaagcgcaugaacucccugaagcccgaccucaugcagcugcggaagauccgcgaccaguaccugguguggcucacccagaagggggcccggcagaagaagaucaacgaguggcugggcaucaagaacgagaccgaggaccaguacgcccugauggaggacgaggacgaccucccccaccacgaggagcgcaccugguacgugggcaagaucaaccggacgcaggccgaggagaugcugagcgggaagcgcgacggcaccuuccugauccgggaguccagccagcgcgggugcuacgcgugcuccgucgugguggacggcgacaccaagcacugcgucaucuaccggaccgccacgggcuucggguucgccgagcccuacaaccucuacggcagccugaaggagcuggugcuccacuaccagcacgccucccuggugcagcacaacgacgcccugaccgucacccucgcgcacccggugcgcgcccccgggcccggccccccgcccgccgcccgguga

SEQ ID NO: 9196 - RNA, 2187 nt, Artificial Sequence
  derived and/or modified sequence opt2 from PI3K__Homo_sapiens__AAD22671
auggccggccccgagggcuuccaguaccgcgcccucuaccccuuccgccgcgagcgccccgaggaccucgagcuccuccccggcgacguccucgucgucucccgcgccgcccuccaggcccucggcgucgccgagggcggcgagcgcugcccccaguccgucggcuggaugcccggccucaacgagcgcacccgccagcgcggcgacuuccccggcaccuacgucgaguuccucggccccgucgcccucgcccgccccggcccccgcccccgcggcccccgcccccuccccgcccgcccccgcgacggcgcccccgagcccggccucacccuccccgaccuccccgagcaguucuccccccccgacgucgcccccccccuccucgucaagcucgucgaggccaucgagcgcaccggccucgacuccgagucccacuaccgccccgagcuccccgccccccgcaccgacuggucccucuccgacgucgaccagugggacaccgccgcccucgccgacggcaucaaguccuuccuccucgcccuccccgccccccucgucacccccgaggccuccgccgaggcccgccgcgcccuccgcgaggccgccggccccgucggccccgcccucgagccccccacccucccccuccaccgcgcccucacccuccgcuuccuccuccagcaccucggccgcgucgccucccgcgcccccgcccucggccccgccguccgcgcccucggcgccaccuucggcccccuccuccuccgcgccccccccccccccuccucccccccccccggcggcgcccccgacggcuccgagcccucccccgacuuccccgcccuccucgucgagaagcuccuccaggagcaccucgaggagcaggaggucgccccccccgcccucccccccaagccccccaaggccaagcccgccuccaccguccucgccaacggcggcuccccccccucccuccaggacgccgagugguacuggggcgacaucucccgcgaggaggucaacgagaagcuccgcgacacccccgacggcaccuuccucguccgcgacgccuccuccaagauccagggcgaguacacccucacccuccgcaagggcggcaacaacaagcucaucaaggucuuccaccgcgacggccacuacggcuucuccgagccccucaccuucugcuccgucgucgaccucaucaaccacuaccgccacgagucccucgcccaguacaacgccaagcucgacacccgccuccucuaccccgucuccaaguaccagcaggaccagaucgucaaggaggacuccgucgaggccgucggcgcccagcucaaggucuaccaccagcaguaccaggacaagucccgcgaguacgaccagcucuacgaggaguacacccgcaccucccaggagcuccagaugaagcgcaccgccaucgaggccuucaacgagaccaucaagaucuucgaggagcagggccagacccaggagaagugcuccaaggaguaccucgagcgcuuccgccgcgagggcaacgagaaggagaugcagcgcauccuccucaacuccgagcgccucaagucccgcaucgccgagauccacgagucccgcaccaagcucgagcagcagcuccgcgcccaggccuccgacaaccgcgagaucgacaagcgcaugaacucccucaagcccgaccucaugcagcuccgcaagauccgcgaccaguaccucgucuggcucacccagaagggcgcccgccagaagaagaucaacgaguggcucggcaucaagaacgagaccgaggaccaguacgcccucauggaggacgaggacgaccucccccaccacgaggagcgcaccugguacgucggcaagaucaaccgcacccaggccgaggagaugcucuccggcaagcgcgacggcaccuuccucauccgcgaguccucccagcgcggcugcuacgccugcuccgucgucgucgacggcgacaccaagcacugcgucaucuaccgcaccgccaccggcuucggcuucgccgagcccuacaaccucuacggcucccucaaggagcucguccuccacuaccagcacgccucccucguccagcacaacgacgcccucaccgucacccucgcccaccccguccgcgcccccggccccggccccccccccgccgcccgcuga

SEQ ID NO: 9197 - RNA, 2187 nt, Artificial Sequence
  derived and/or modified sequence opt3 from PI3K__Homo_sapiens__AAD22671
auggccggccccgagggguuccaguacagagcucuguauccuuuuaggcgggaacgcccagaggaccucgaacuucugccgggagauguguuggucguuagccgagcagccuuacaagcgcuggguguggcugagggcggggaacguugcccccaguccguaggauggaugccuggccuaaacgagagaaccaggcagcggggugacuucccagggacauacguggaguuucucggacccgucgcccuggcacgcccuggcccaagacccaggggcccucggccacuuccggcccgcccccgagauggggcuccugaaccaggacugacuuugcccgaccucccugagcaguucucuccacccgauguggcaccgccucugcugguuaagcucguggaagccaucgagagaacggguuuagacucagagagucacuauaggcccgaacugccagcuccucggaccgauuggagccuuuccgacgucgaucaaugggacacagccgcguuggcagauggcauuaaaucuuuucugcuagcccuccccgcuccacuggugacucccgaggccucggcagaagcucgucgcgcccuuagagaggcggccgggccuguaggaccagcacuggaaccgcccaccuugccucuccauagggcucugacauuacgguuccugcuccagcaccuuggccgaguugccucacgcgcuccagcccugggucccgcagugagagccuugggggcuaccuuuggaccucuacugcucagggcgccacccccgccuagcaguccacccccuggcggcgcacccgacggguccgagccaucuccugauuuccccgcccugcuugucgagaagcuguugcaggaacaucucgaggaacaggagguggcuccaccggcccugccucccaaaccacccaaggcaaaaccugccagcacuguguuagcuaauggagguuccccacccucacugcaagacgccgaaugguacuggggcgacauaagucgggaggaggucaacgaaaagcuacgcgauacaccugacgggaccuuucucguuagagaugcaagcucuaagauccagggagaguauacgcugacucuuaggaaaggcgguaauaacaaguugauuaaaguguuccaccgugacgggcauuacggcuuuuccgaaccgcugaccuucuguucaguaguggaucucaucaaucacuaucggcacgagagccuggcgcaguacaacgcuaaacuugacacacgacuguuguacccagucaguaaguaucagcaagaucagauugugaaggaagacucuguugaggccgugggagcacagcucaaggucuaccaucaacaguaucaggauaaauccagagaguacgaccagcuguaugaagaguacacuaggaccagccaagaauuacagaugaagcgcacagccaucgaggcuuuuaaugagaccauaaaaaucuucgaagaacagggccagacgcaagaaaagugcucgaaagaguaucuggaacgguucagaagggaggggaacgagaaggaaaugcagcgcauucuacucaauucugagcgacugaaaucccggaucgccgaaauucacgagucacguacuaaacuugaacagcaguugagagcacaagcuagugauaacagggagaucgacaagcgcaugaauagccugaagcccgaccucaugcagcugcggaagauaagagaucaguacuuaguguggcugacacagaaaggagccaggcaaaagaaaauuaacgaguggcuugguaucaagaaugaaaccgaggaccaguacgcguugauggaagaugaggacgaucucccucaucacgaggagcgaacuugguauguaggcaagauuaaccgcacacaggccgaggaaaugcuguccgggaaacgggacggaaccuuucuaaucagagagucuagccaaaggggcuguuacgcuugcucaguuguggucgauggugacacgaagcacugugugaucuaucguaccgcaacaggguucggcuuugccgaaccauacaaucuguauggaagucucaaagagcugguccuucauuaccagcacgcuuccuuggugcagcauaacgaugcccugacuguuaccuuagcacaccccgugcgcgcgccuggcccggggcccccuccagccgcucgguga

SEQ ID NO: 9198 - RNA, 2187 nt, Artificial Sequence
  derived and/or modified sequence opt4 from PI3K__Homo_sapiens__AAD22671
auggccggccccgagggcuuccaguacagagcccuguaccccuucagaagagagagacccgaggaccuggagcugcugcccggcgacgugcugguggugagcagagccgcccugcaggcccugggcguggccgagggcggcgagagaugcccccagagcgugggcuggaugcccggccugaacgagagaaccagacagagaggcgacuuccccggcaccuacguggaguuccugggccccguggcccuggccagacccggccccagacccagaggccccagaccccugcccgccagacccagagacggcgcccccgagcccggccugacccugcccgaccugcccgagcaguucagcccccccgacguggcccccccccugcuggugaagcugguggaggccaucgagagaaccggccuggacagcgagagccacuacagacccgagcugcccgcccccagaaccgacuggagccugagcgacguggaccagugggacaccgccgcccuggccgacggcaucaagagcuuccugcuggcccugcccgccccccuggugacccccgaggccagcgccgaggccagaagagcccugagagaggccgccggccccgugggccccgcccuggagccccccacccugccccugcacagagcccugacccugagauuccugcugcagcaccugggcagaguggccagcagagcccccgcccugggccccgccgugagagcccugggcgccaccuucggcccccugcugcugagagccccccccccccccagcagccccccccccggcggcgcccccgacggcagcgagcccagccccgacuuccccgcccugcugguggagaagcugcugcaggagcaccuggaggagcaggagguggccccccccgcccugccccccaagccccccaaggccaagcccgccagcaccgugcuggccaacggcggcagcccccccagccugcaggacgccgagugguacuggggcgacaucagcagagaggaggugaacgagaagcugagagacacccccgacggcaccuuccuggugagagacgccagcagcaagauccagggcgaguacacccugacccugagaaagggcggcaacaacaagcugaucaagguguuccacagagacggccacuacggcuucagcgagccccugaccuucugcagcgugguggaccugaucaaccacuacagacacgagagccuggcccaguacaacgccaagcuggacaccagacugcuguaccccgugagcaaguaccagcaggaccagaucgugaaggaggacagcguggaggccgugggcgcccagcugaagguguaccaccagcaguaccaggacaagagcagagaguacgaccagcuguacgaggaguacaccagaaccagccaggagcugcagaugaagagaaccgccaucgaggccuucaacgagaccaucaagaucuucgaggagcagggccagacccaggagaagugcagcaaggaguaccuggagagauucagaagagagggcaacgagaaggagaugcagagaauccugcugaacagcgagagacugaagagcagaaucgccgagauccacgagagcagaaccaagcuggagcagcagcugagagcccaggccagcgacaacagagagaucgacaagagaaugaacagccugaagcccgaccugaugcagcugagaaagaucagagaccaguaccugguguggcugacccagaagggcgccagacagaagaagaucaacgaguggcugggcaucaagaacgagaccgaggaccaguacgcccugauggaggacgaggacgaccugccccaccacgaggagagaaccugguacgugggcaagaucaacagaacccaggccgaggagaugcugagcggcaagagagacggcaccuuccugaucagagagagcagccagagaggcugcuacgccugcagcguggugguggacggcgacaccaagcacugcgugaucuacagaaccgccaccggcuucggcuucgccgagcccuacaaccuguacggcagccugaaggagcuggugcugcacuaccagcacgccagccuggugcagcacaacgacgcccugaccgugacccuggcccaccccgugagagcccccggccccggccccccccccgccgccagauga

SEQ ID NO: 9199 - RNA, 2187 nt, Artificial Sequence
  derived and/or modified sequence opt5 from PI3K__Homo_sapiens__AAD22671
auggccggccccgagggguuccaguacagagcucuguauccuuuucggcgcgaaagaccggaggaccucgaacugcuucccggagaugugcuggucguuagccgggccgcgcuccaagcucugggcguggccgaagggggagaacgcugcccucaguccgugggcuggaugcccgggcuuaacgagagaacccggcagcgcggagacuucccuggcacauacgucgaguuucugggccccguggcccucgcuagaccugggccgcggccccgcggaccuagaccccugccugcccggccccgcgauggcgcuccggaaccugggcugacgcuccccgaccugccugagcaguucucuccucccgauguugccccuccgcuucuggugaagcucgucgaagcgaucgagagaaccggacuggacagcgagucccacuaucggcccgaacuuccugcuccccgcacagauuggucucugagcgacguggaucaaugggacaccgccgcccucgcugauggcauuaaauccuuucugcuggcccucccugcgccccugguuacaccggaggccucugcugaagccagacgggcucuuagagaggccgccgggccugugggacccgcucuggaaccucccacccucccucugcaucgcgcgcuuacacugcgguuccuccugcagcaccugggcagagucgccagccgcgcucccgcccucggcccggccgugcgggcucugggggccaccuuuggaccucuucugcucagagcgcccccgccucccuccucucccccucccggcggggcucccgacggaagcgagcccuccccugauuuccccgcccugcuuguggagaagcugcuccaggaacaucuggaggaacaggaggucgccccgccugcucugcccccuaaacccccgaaggccaaaccugcuagcacgguucucgccaauggcgggucucccccuucccugcaagacgcggaaugguacuggggagacaucagccgcgaggaggugaacgaaaagcugcgggauacccccgacggcacauuucuugugagagaugccucuuccaagauucagggcgaguauacccucacacugcgcaaagggggaaauaacaagcugaucaaagucuuccaccgggacggccauuacggguuuagcgaaccccuuaccuucuguuccgugguugaucucauuaaucacuauagacacgagucucuggcucaguacaacgccaagcuggacacgcgccuccuguacccugugagcaaauaucagcaagaucagaucgucaaggaagacuccguggaggcuguuggagcccagcuuaagguguaccaucaacaguaucaggauaaaagccgggaguacgaccagcuguaugaagaguacacaagaaccucucaagaacuccagaugaagcggacagcgaucgaggccuuuaaugagaccauuaaaaucuucgaggagcagggccagacccaagaaaagugcuccaaagaguaucuggaacgcuucagacgggaggggaacgagaaggaaaugcagcgcauucugcuuaauagcgagagacucaaaucucggaucgcugaaauucacgagagcagaacaaagcuggaacagcagcugcgcgcccaggcuuccgauaacagagagaucgacaagcggaugaacucucucaaaccggaccugaugcaacuucgcaagauuagagaucaguaccuggucuggcucacgcagaaaggcgcccggcaaaagaaaaucaaugaguggcugggaaucaagaaugaaaccgaggaccaguacgcccugauggaagaugaggacgaucuuccccaucacgaggaacgcacaugguaugugggcaagauuaacagaacccaggcugaggaaaugcucagcgggaaacgggacggaacauuucugauccgcgaguccagccaaagaggcuguuacgcgugcucugucgugguugauggggacaccaagcacugugugauuuaucggacggccacaggauucggcuuugcugaaccuuacaaucuguaugggucccucaaagagcugguccuucauuaccagcacgccagccuggugcagcauaacgaugcccucaccguuacccuggcucaccccgugcgcgccccuggccccggaccuccgcccgcggcuagauga

SEQ ID NO: 9200 - protein, 724 aa, Artificial Sequence
  PI3K__Homo_sapiens__P27986
MSAEGYQYRALYDYKKEREEDIDLHLGDILTVNKGSLVALGFSDGQEARPEEIGWLNGYNETTGERGDFPGTYVEYIGRKKISPPTPKPRPPRPLPVAPGSSKTEADVEQQALTLPDLAEQFAPPDIAPPLLIKLVEAIEKKGLECSTLYRTQSSSNLAELRQLLDCDTPSVDLEMIDVHVLADAFKRYLLDLPNPVIPAAVYSEMISLAPEVQSSEEYIQLLKKLIRSPSIPHQYWLTLQYLLKHFFKLSQTSSKNLLNARVLSEIFSPMLFRFSAASSDNTENLIKVIEILISTEWNERQPAPALPPKPPKPTTVANNGMNNNMSLQDAEWYWGDISREEVNEKLRDTADGTFLVRDASTKMHGDYTLTLRKGGNNKLIKIFHRDGKYGFSDPLTFSSVVELINHYRNESLAQYNPKLDVKLLYPVSKYQQDQVVKEDNIEAVGKKLHEYNTQFQEKSREYDRLYEEYTRTSQEIQMKRTAIEAFNETIKIFEEQCQTQERYSKEYIEKFKREGNEKEIQRIMHNYDKLKSRISEIIDSRRRLEEDLKKQAAEYREIDKRMNSIKPDLIQLRKTRDQYLMWLTQKGVRQKKLNEWLGNENTEDQYSLVEDDEDLPHHDEKTWNVGSSNRNKAENLLRGKRDGTFLVRESSKQGCYACSVVVDGEVKHCVINKTATGYGFAEPYNLYSSLKELVLHYQHTSLVQHNDSLNVTLAYPVYAQQRR

SEQ ID NO: 9201 - RNA, 2175 nt, Artificial Sequence
  PI3K__Homo_sapiens__AAH94795
augagugcugagggguaccaguacagagcgcuguaugauuauaaaaaggaaagagaagaagauauugacuugcacuugggugacauauugacugugaauaaaggguccuuaguagcucuuggauucagugauggacaggaagccaggccugaagaaauuggcugguuaaauggcuauaaugaaaccacaggggaaaggggggacuuuccgggaacuuacguagaauauauuggaaggaaaaaaaucucgccucccacaccaaagccccggccaccucggccucuuccuguugcaccagguucuucgaaaacugaagcagauguugaacaacaagcuuugacucucccggaucuugcagagcaguuugccccuccugacauugccccgccucuucuuaucaagcucguggaagccauugaaaagaaaggucuggaauguucaacucuauacagaacacagagcuccagcaaccuggcagaauuacgacagcuucuugauugugauacacccuccguggacuuggaaaugaucgaugugcacguuuuggcugacgcuuucaaacgcuaucuccuggacuuaccaaauccugucauuccagcagccguuuacagugaaaugauuucuuuagcuccagaaguacaaagcuccgaagaauauauucagcuauugaagaagcuuauuaggucgccuagcauaccucaucaguauuggcuuacgcuucaguauuuguuaaaacauuucuucaagcucucucaaaccuccagcaaaaaucuguugaaugcaagaguacucucugaaauuuucagcccuaugcuuuucagauucucagcagccagcucugauaauacugaaaaccucauaaaaguuauagaaauuuuaaucucaacugaauggaaugaacgacagccugcaccagcacugccuccuaaaccaccaaaaccuacuacuguagccaacaacgguaugaauaacaauauguccuuacaagaugcugaaugguacuggggagauaucucgagggaagaagugaaugaaaaacuucgagauacagcagacgggaccuuuuugguacgagaugcgucuacuaaaaugcauggugauuauacucuuacacuaaggaaagggggaaauaacaaauuaaucaaaauauuucaucgagaugggaaauauggcuucucugacccauuaaccuucaguucugugguugaauuaauaaaccacuaccggaaugaaucucuagcucaguauaaucccaaauuggaugugaaauuacuuuauccaguauccaaauaccaacaggaucaaguugucaaagaagauaauauugaagcuguagggaaaaaauuacaugaauauaacacucaguuucaagaaaaaagucgagaauaugauagauuauaugaagaauauacccgcacaucccaggaaauccaaaugaaaaggacagcuauugaagcauuuaaugaaaccauaaaaauauuugaagaacagugccagacccaagagcgguacagcaaagaauacauagaaaaguuuaaacgugaaggcaaugagaaagaaauacaaaggauuaugcauaauuaugauaaguugaagucucgaaucagugaaauuauugacaguagaagaagauuggaagaagacuugaagaagcaggcagcugaguaucgagaaauugacaaacguaugaacagcauuaaaccagaccuuauccagcugagaaagacgagagaccaauacuugaugugguugacucaaaaagguguucggcaaaagaaguugaacgagugguugggcaaugaaaacacugaagaccaauauucacugguggaagaugaugaagauuugccccaucaugaugagaagacauggaauguuggaagcagcaaccgaaacaaagcugaaaaccuguugcgagggaagcgagauggcacuuuucuuguccgggagagcaguaaacagggcugcuaugccugcucuguagugguggacggcgaaguaaagcauugugucauaaacaaaacagcaacuggcuauggcuuugccgagcccuauaacuuguacagcucucugaaagaacuggugcuacauuaccaacacaccucccuugugcagcacaacgacucccucaaugucacacuagccuacccaguauaugcacagcagaggcgauga

SEQ ID NO: 9202 - RNA, 2175 nt, Artificial Sequence
  derived and/or modified sequence opt1 from PI3K__Homo_sapiens__AAH94795
augagcgccgagggcuaccaguaccgcgcccuguacgacuacaagaaggagcgggaggaggacaucgaccuccaccugggggacauccugaccgugaacaagggcucccucgucgcgcugggguucagcgacggccaggaggcccgccccgaggagaucggguggcugaacggcuacaacgagaccacgggcgagcgcggggacuucccgggcaccuacguggaguacaucgggcggaagaagaucuccccgcccacccccaagccccggccgccccgcccccuccccguggcccccggcagcuccaagaccgaggccgacgucgagcagcaggcccugacgcugcccgaccucgcggagcaguucgcgcccccggacaucgccccgccccugcugaucaagcucguggaggccaucgagaagaaggggcuggagugcagcacccuguaccggacccaguccagcuccaaccucgccgagcugcgccagcugcucgacugcgacacccccagcguggaccuggagaugaucgacguccacgugcuggccgacgccuucaagcgguaccuccuggaccugcccaaccccgugauccccgccgccgucuacuccgagaugaucagccucgcgcccgaggugcaguccagcgaggaguacauccagcugcugaagaagcucauccgcuccccgagcaucccccaccaguacuggcugacgcugcaguaccuccugaagcacuucuucaagcugucccagaccagcuccaagaaccuccugaacgcccgggugcugagcgagaucuucagccccaugcuguuccgcuucuccgccgccagcuccgacaacaccgagaaccugaucaaggucaucgagauccugaucagcaccgaguggaacgagcggcagcccgccccggcgcucccgcccaagccgcccaagcccacgaccguggccaacaacggcaugaacaacaacaugucccugcaggacgccgagugguacuggggcgacaucagccgcgaggaggugaacgagaagcugcgggacaccgccgacgggaccuuccucguccgcgacgccuccacgaagaugcacggcgacuacacccugacccugcggaagggcgggaacaacaagcucaucaagaucuuccaccgcgacggcaaguacggguucagcgacccccugaccuucuccagcgugguggagcugaucaaccacuaccggaacgagucccucgcgcaguacaaccccaagcuggacgucaagcugcuguaccccgugagcaaguaccagcaggaccagguggucaaggaggacaacaucgaggccgugggcaagaagcuccacgaguacaacacgcaguuccaggagaagucccgcgaguacgaccggcuguacgaggaguacacccgcaccagccaggagauccagaugaagcgcaccgccaucgaggccuucaacgagacgaucaagaucuucgaggagcagugccagacccaggagcgguacuccaaggaguacaucgagaaguucaagcgcgaggggaacgagaaggagauccagcggaucaugcacaacuacgacaagcucaagagccgcaucuccgagaucaucgacagccggcgccggcucgaggaggaccugaagaagcaggccgcggaguaccgcgagaucgacaagcggaugaacuccaucaagcccgaccugauccagcuccgcaagacccgggaccaguaccugauguggcugacccagaagggcgugcgccagaagaagcucaacgaguggcuggggaacgagaacacggaggaccaguacagccuggucgaggacgacgaggaccucccccaccacgacgagaagaccuggaacgugggcagcuccaaccggaacaaggccgagaaccugcugcgcggcaagcgggacgggaccuuccucguccgcgagagcuccaagcagggcugcuacgccugcagcgugguggucgacggggaggugaagcacugcgugaucaacaagaccgccacgggcuacggguucgcggagccguacaaccuguacuccagccugaaggagcucguccugcacuaccagcacaccucccuggugcagcacaacgacagccucaacgugacccuggccuaccccgucuacgcccagcagcggcgcuga

SEQ ID NO: 9203 - RNA, 2175 nt, Artificial Sequence
  derived and/or modified sequence opt2 from PI3K__Homo_sapiens__AAH94795
auguccgccgagggcuaccaguaccgcgcccucuacgacuacaagaaggagcgcgaggaggacaucgaccuccaccucggcgacauccucaccgucaacaagggcucccucgucgcccucggcuucuccgacggccaggaggcccgccccgaggagaucggcuggcucaacggcuacaacgagaccaccggcgagcgcggcgacuuccccggcaccuacgucgaguacaucggccgcaagaagaucuccccccccacccccaagccccgccccccccgcccccuccccgucgcccccggcuccuccaagaccgaggccgacgucgagcagcaggcccucacccuccccgaccucgccgagcaguucgccccccccgacaucgcccccccccuccucaucaagcucgucgaggccaucgagaagaagggccucgagugcuccacccucuaccgcacccaguccuccuccaaccucgccgagcuccgccagcuccucgacugcgacacccccuccgucgaccucgagaugaucgacguccacguccucgccgacgccuucaagcgcuaccuccucgaccuccccaaccccgucauccccgccgccgucuacuccgagaugaucucccucgcccccgagguccaguccuccgaggaguacauccagcuccucaagaagcucauccgcucccccuccaucccccaccaguacuggcucacccuccaguaccuccucaagcacuucuucaagcucucccagaccuccuccaagaaccuccucaacgcccgcguccucuccgagaucuucucccccaugcucuuccgcuucuccgccgccuccuccgacaacaccgagaaccucaucaaggucaucgagauccucaucuccaccgaguggaacgagcgccagcccgcccccgcccucccccccaagccccccaagcccaccaccgucgccaacaacggcaugaacaacaacaugucccuccaggacgccgagugguacuggggcgacaucucccgcgaggaggucaacgagaagcuccgcgacaccgccgacggcaccuuccucguccgcgacgccuccaccaagaugcacggcgacuacacccucacccuccgcaagggcggcaacaacaagcucaucaagaucuuccaccgcgacggcaaguacggcuucuccgacccccucaccuucuccuccgucgucgagcucaucaaccacuaccgcaacgagucccucgcccaguacaaccccaagcucgacgucaagcuccucuaccccgucuccaaguaccagcaggaccaggucgucaaggaggacaacaucgaggccgucggcaagaagcuccacgaguacaacacccaguuccaggagaagucccgcgaguacgaccgccucuacgaggaguacacccgcaccucccaggagauccagaugaagcgcaccgccaucgaggccuucaacgagaccaucaagaucuucgaggagcagugccagacccaggagcgcuacuccaaggaguacaucgagaaguucaagcgcgagggcaacgagaaggagauccagcgcaucaugcacaacuacgacaagcucaagucccgcaucuccgagaucaucgacucccgccgccgccucgaggaggaccucaagaagcaggccgccgaguaccgcgagaucgacaagcgcaugaacuccaucaagcccgaccucauccagcuccgcaagacccgcgaccaguaccucauguggcucacccagaagggcguccgccagaagaagcucaacgaguggcucggcaacgagaacaccgaggaccaguacucccucgucgaggacgacgaggaccucccccaccacgacgagaagaccuggaacgucggcuccuccaaccgcaacaaggccgagaaccuccuccgcggcaagcgcgacggcaccuuccucguccgcgaguccuccaagcagggcugcuacgccugcuccgucgucgucgacggcgaggucaagcacugcgucaucaacaagaccgccaccggcuacggcuucgccgagcccuacaaccucuacuccucccucaaggagcucguccuccacuaccagcacaccucccucguccagcacaacgacucccucaacgucacccucgccuaccccgucuacgcccagcagcgccgcuga

SEQ ID NO: 9204 - RNA, 2175 nt, Artificial Sequence
  derived and/or modified sequence opt3 from PI3K__Homo_sapiens__AAH94795
augagcgccgagggcuaccaguauagagcucuguacgacuauaagaaagaaagggaggaagauaucgaccuccaccuuggggauauucugaccgugaacaagggauccuuggucgcauuagguuucucugacggccaagaggcccggcccgaagagauaggguggcugaauggauacaacgagacaacuggcgaacgcggugauuuuccugggacguauguugaguacaucggacgaaagaagauuucaccaccgacccccaaaccucguccacccagaccucuaccaguggcgcccggcaguagcaagacagaagcugacguagagcagcaggcccucacucugccugaucuugcagagcaguucgccccaccggacaucgcucccccucuguugauuaagcucguggaagcaaucgagaaaaagggccuggaaugcuccacccuguauaggacacaaucuucgucaaaucucgccgaguuacggcagcugcuugauugugacaccccaagcgucgauuuggaaaugauagacgugcauguucuggcugaugccuuuaaacgcuaccuacucgaccugcccaacccugugaucccagcggcagucuacagugagaugauuucccuugcccccgaggugcagucuagcgaagaguauauccagcuguugaagaaacucauuagauccccgucaaucccucaccaauacuggcugacuuuacaguaucugcucaagcauuucuuuaaacuuagucagacaagcucuaaaaaucuguugaacgcuaggguacuauccgaaauauucucacccaugcuguuucgguucagcgccgcaaguucugacaauaccgagaaccucauuaagguuaucgaaauucugaucuccacggaguggaaugagcgccagccagcuccugcccuucccccaaaacccccuaagccaacuaccguggcgaacaaugggaugaacaauaacaugagccugcaagaugccgaaugguacuggggagacaucucgcgagaggaagucaaugagaaauugagagauacagcagacgguacuuuucucgugagggaugcuucuaccaagaugcacggcgacuauacacugaccuuacggaaagggggaaacaacaagcugauuaagauauuccaucgugauggcaaauacgguuuuuccgacccgcuaacguucucaaguguggucgaacucaucaaucacuaucgcaacgagagccuggcccaguacaaucccaaacuugauguuaaguugcuguacccuguguccaaguaucagcaagaccagguagugaaagaggauaacauugaagcugucgggaagaagcuccacgaguacaauacucaguuucaggaaaaaucuagagaguaugacaggcuguacgaggaauauacacggaccagccaagagauccagaugaagcgaacugccauagaagcauucaacgagacaauuaaaaucuucgaggaacagugccagacccaagagcgcuacucaaaggaauauaucgagaaauuuaagagagaaggaaaugagaaggaaauucagaggaucaugcauaacuacgacaaacuuaagagucggauuuccgagauaaucgauagccgcagaaggcuggaggaagacuugaaaaagcaggccgcugaguaccgugaaauugauaaacggaugaacucuaucaagccagaccucauccagcugcgaaagacgagagaucaauauuuaauguggcugacccagaaaggcgugaggcagaagaaacuaaaugaguggcucggcaaugaaaacacagaggaccaguacucacugguugaggaugacgaagaucuuccccaccaugacgagaagacuuggaauguggggaguagcaaccgcaauaaagcggaaaacuugcugcggggaaagagagaugguaccuuccucgucagggaguccucuaaacaaggcuguuaugcaugcucggugguaguugacggggaggugaagcacugugucauuaacaagacagccacuggauacggcuuugcugaaccuuauaaucuguacagcuccuuaaaagagcuggugcuucacuaucagcauaccucauugguccagcacaacgauagucucaaugugacacuggccuacccaguuuacgcacaacagcgccgauga

SEQ ID NO: 9205 - RNA, 2175 nt, Artificial Sequence
  derived and/or modified sequence opt4 from PI3K__Homo_sapiens__AAH94795
augagcgccgagggcuaccaguacagagcccuguacgacuacaagaaggagagagaggaggacaucgaccugcaccugggcgacauccugaccgugaacaagggcagccugguggcccugggcuucagcgacggccaggaggccagacccgaggagaucggcuggcugaacggcuacaacgagaccaccggcgagagaggcgacuuccccggcaccuacguggaguacaucggcagaaagaagaucagcccccccacccccaagcccagaccccccagaccccugcccguggcccccggcagcagcaagaccgaggccgacguggagcagcaggcccugacccugcccgaccuggccgagcaguucgccccccccgacaucgcccccccccugcugaucaagcugguggaggccaucgagaagaagggccuggagugcagcacccuguacagaacccagagcagcagcaaccuggccgagcugagacagcugcuggacugcgacacccccagcguggaccuggagaugaucgacgugcacgugcuggccgacgccuucaagagauaccugcuggaccugcccaaccccgugauccccgccgccguguacagcgagaugaucagccuggcccccgaggugcagagcagcgaggaguacauccagcugcugaagaagcugaucagaagccccagcaucccccaccaguacuggcugacccugcaguaccugcugaagcacuucuucaagcugagccagaccagcagcaagaaccugcugaacgccagagugcugagcgagaucuucagccccaugcuguucagauucagcgccgccagcagcgacaacaccgagaaccugaucaaggugaucgagauccugaucagcaccgaguggaacgagagacagcccgcccccgcccugccccccaagccccccaagcccaccaccguggccaacaacggcaugaacaacaacaugagccugcaggacgccgagugguacuggggcgacaucagcagagaggaggugaacgagaagcugagagacaccgccgacggcaccuuccuggugagagacgccagcaccaagaugcacggcgacuacacccugacccugagaaagggcggcaacaacaagcugaucaagaucuuccacagagacggcaaguacggcuucagcgacccccugaccuucagcagcgugguggagcugaucaaccacuacagaaacgagagccuggcccaguacaaccccaagcuggacgugaagcugcuguaccccgugagcaaguaccagcaggaccagguggugaaggaggacaacaucgaggccgugggcaagaagcugcacgaguacaacacccaguuccaggagaagagcagagaguacgacagacuguacgaggaguacaccagaaccagccaggagauccagaugaagagaaccgccaucgaggccuucaacgagaccaucaagaucuucgaggagcagugccagacccaggagagauacagcaaggaguacaucgagaaguucaagagagagggcaacgagaaggagauccagagaaucaugcacaacuacgacaagcugaagagcagaaucagcgagaucaucgacagcagaagaagacuggaggaggaccugaagaagcaggccgccgaguacagagagaucgacaagagaaugaacagcaucaagcccgaccugauccagcugagaaagaccagagaccaguaccugauguggcugacccagaagggcgugagacagaagaagcugaacgaguggcugggcaacgagaacaccgaggaccaguacagccugguggaggacgacgaggaccugccccaccacgacgagaagaccuggaacgugggcagcagcaacagaaacaaggccgagaaccugcugagaggcaagagagacggcaccuuccuggugagagagagcagcaagcagggcugcuacgccugcagcguggugguggacggcgaggugaagcacugcgugaucaacaagaccgccaccggcuacggcuucgccgagcccuacaaccuguacagcagccugaaggagcuggugcugcacuaccagcacaccagccuggugcagcacaacgacagccugaacgugacccuggccuaccccguguacgcccagcagagaagauga

SEQ ID NO: 9206 - RNA, 2175 nt, Artificial Sequence
  derived and/or modified sequence opt5 from PI3K__Homo_sapiens__AAH94795
augagcgccgagggcuaccaguauagagcucuguacgacuauaagaaagaacgggaggaagauaucgaccuccaccugggggauauucuuaccgugaacaagggaucccuggucgcccucggcuucucugacgggcaagaggcgcgccccgaagagaucggauggcugaauggcuacaacgagacaacgggggaaagaggagauuuuccuggcaccuauguugaguacauuggccggaaaaagaucagcccgcccacaccuaaaccccgcccucccagaccucuuccgguggcucccggguccucuaagaccgaagccgacguggagcagcaggcccugacacucccugaucuggcugagcaguucgcucccccugacauugcucccccgcugcucaucaagcuggucgaagccaucgagaaaaagggacuugaaugcagcacccuguaucggacacaauccucuagcaaucucgcggagcugcgccagcuucuggauugugacaccccuuccguggaucucgaaaugauugacguucaugugcuggccgaugcuuuuaaaagauaccugcucgaccugcccaacccugucauccccgccgcuguguacagcgagaugauuucucuugcccccgagguucaguccagcgaagaguauauccagcugcucaagaaacugauucggucuccuuccaucccgcaccaauacuggcuuacgcugcaguaucuccugaagcauuucuuuaagcugagccagaccucuuccaaaaaucuccugaacgcgcgcgugcuuagcgaaauuuucucccccaugcuguuuagauucucugccgcuagcuccgacaauacagagaaccucaucaaggucaucgaaauucugaucagcaccgaguggaaugagcggcagccugcccccgcccuuccucccaaaccgccuaagcccacaaccguggccaacaauggcaugaacaauaacaugucucugcaagaugccgaaugguacuggggagacauuucccgcgaggaagugaaugagaaacucagagauacggcugacgggacauuucugguccgggaugcgagcaccaagaugcacggcgacuauacacugacccuccgcaaagggggaaacaacaagcugaucaagauuuuccauagagauggcaaauacggcuuuucugacccucuuaccuucagcuccguuguggaacugaucaaucacuaucggaacgagucucucgcccaguacaaucccaagcuggaugugaaacugcuuuacccugucagcaaguaucagcaagaccaggugguuaaagaggauaacaucgaagcuguggggaagaagcuccacgaguacaauacacaguuucaggaaaaauccagagaguaugaccgccuguacgaggaauauacgcggaccagccaagagauucagaugaagagaacagccaucgaagccuucaacgagaccauuaaaaucuucgaggaacagugccagacacaagagcgcuacucuaaggaauauauugagaaauuuaagcgggaaggaaaugagaaggaaauccagagaaucaugcauaacuacgacaaacugaagucccgcauuagcgagaucauugauucucggagacgccucgaggaagaccugaaaaagcaggcugccgaguaccgggaaaucgauaaaagaaugaacuccauuaagcccgaccuuauccagcugcgcaagacccgggaucaauaucucauguggcugacgcagaaaggcgucagacagaagaaacugaaugaguggcuugggaaugaaaacacagaggaccaguacagccucguggaggaugacgaagaucugccgcaccaugacgagaagaccuggaauguuggauccucuaaccggaauaaagcggaaaaccugcuccgcggcaagagagaugggaccuuccuggugcgggagagcuccaaacaaggauguuaugcuugcucugucguggucgacggcgaggugaagcacuguguuauuaacaagacagccaccggcuacggguuugccgaaccuuauaaucuuuacagcucccugaaagagcucgugcugcacuaucagcauacaagccugguccagcacaacgauucucuuaaugugacgcucgcuuaccccguuuacgcccaacagagacgcuga

SEQ ID NO: 9207 - protein, 1068 aa, Artificial Sequence
  PI3K__Homo_sapiens__P42336
MPPRPSSGELWGIHLMPPRILVECLLPNGMIVTLECLREATLITIKHELFKEARKYPLHQLLQDESSYIFVSVTQEAEREEFFDETRRLCDLRLFQPFLKVIEPVGNREEKILNREIGFAIGMPVCEFDMVKDPEVQDFRRNILNVCKEAVDLRDLNSPHSRAMYVYPPNVESSPELPKHIYNKLDKGQIIVVIWVIVSPNNDKQKYTLKINHDCVPEQVIAEAIRKKTRSMLLSSEQLKLCVLEYQGKYILKVCGCDEYFLEKYPLSQYKYIRSCIMLGRMPNLMLMAKESLYSQLPMDCFTMPSYSRRISTATPYMNGETSTKSLWVINSALRIKILCATYVNVNIRDIDKIYVRTGIYHGGEPLCDNVNTQRVPCSNPRWNEWLNYDIYIPDLPRAARLCLSICSVKGRKGAKEEHCPLAWGNINLFDYTDTLVSGKMALNLWPVPHGLEDLLNPIGVTGSNPNKETPCLELEFDWFSSVVKFPDMSVIEEHANWSVSREAGFSYSHAGLSNRLARDNELRENDKEQLKAISTRDPLSEITEQEKDFLWSHRHYCVTIPEILPKLLLSVKWNSRDEVAQMYCLVKDWPPIKPEQAMELLDCNYPDPMVRGFAVRCLEKYLTDDKLSQYLIQLVQVLKYEQYLDNLLVRFLLKKALTNQRIGHFFFWHLKSEMHNKTVSQRFGLLLESYCRACGMYLKHLNRQVEAMEKLINLTDILKQEKKDETQKVQMKFLVEQMRRPDFMDALQGFLSPLNPAHQLGNLRLEECRIMSSAKRPLWLNWENPDIMSELLFQNNEIIFKNGDDLRQDMLTLQIIRIMENIWQNQGLDLRMLPYGCLSIGDCVGLIEVVRNSHTIMQIQCKGGLKGALQFNSHTLHQWLKDKNKGEIYDAAIDLFTRSCAGYCVATFILGIGDRHNSNIMVKDDGQLFHIDFGHFLDHKKKKFGYKRERVPFVLTQDFLIVISKGAQECTKTREFERFQEMCYKAYLAIRQHANLFINLFSMMLGSGMPELQSFDDIAYIRKTLALDKTEQEALEYFMKQMNDAHHGGWTTKMDWIFHTIKQHALN

SEQ ID NO: 9208 - RNA, 3207 nt, Artificial Sequence
  PI3K__Homo_sapiens__AAB39753
augccuccaagaccaucaucaggugaacuguggggcauccacuugaugcccccaagaauccuaguagaauguuuacuaccaaauggaaugauagugacuuuagaaugccuccgugaggcuacauuaauaaccauaaagcaugaacuauuuaaagaagcaagaaaauacccccuccaucaacuucuucaagaugaaucuucuuacauuuucguaaguguuacccaagaagcagaaagggaagaauuuuuugaugaaacaagacgacuuugugaccuucggcuuuuucaacccuuuuuaaaaguaauugaaccaguaggcaaccgugaagaaaagauccucaaucgagaaauugguuuugcuaucggcaugccagugugugaauuugauaugguuaaagauccagaaguacaggacuuccgaagaaauauucugaacguuuguaaagaagcuguggaucuuagggaccucaauucaccucauaguagagcaauguaugucuauccuccaaauguagaaucuucaccagaauugccaaagcacauauauaauaaauuagauaaagggcaaauaauaguggugaucuggguaauaguuucuccaaauaaugacaagcagaaguauacucugaaaaucaaccaugacuguguaccagaacaaguaauugcugaagcaaucaggaaaaaaacucgaaguauguugcuauccucugaacaacuaaaacucuguguuuuagaauaucagggcaaguauauuuuaaaaguguguggaugugaugaauacuuccuagaaaaauauccucugagucaguauaaguauauaagaagcuguauaaugcuugggaggaugcccaauuugauguugauggcuaaagaaagccucuauucucaacugccaauggacuguuuuacaaugccaucuuauuccagacgcauuuccacagcuacaccauauaugaauggagaaacaucuacaaaaucccuuuggguuauaaauagugcacucagaauaaaaauucuuugugcaaccuacgugaauguaaauauucgagacauugauaagaucuauguucgaacagguaucuaccauggaggagaacccuuaugugacaaugugaacacucaaagaguaccuuguuccaaucccagguggaaugaauggcugaauuaugauauauacauuccugaucuuccucgugcugcucgacuuugccuuuccauuugcucuguuaaaggccgaaagggugcuaaagaggaacacuguccauuggcauggggaaauauaaacuuguuugauuacacagacacucuaguaucuggaaaaauggcuuugaaucuuuggccaguaccucauggacuagaagauuugcugaacccuauugguguuacuggaucaaauccaaauaaagaaacuccaugcuuagaguuggaguuugacugguucagcagugugguaaaguucccagauaugucagugauugaagagcaugccaauuggucuguaucccgagaagcaggauuuagcuauucccacgcaggacugaguaacagacuagcuagagacaaugaauuaagggaaaaugacaaagaacagcucaaagcaauuucuacacgagauccucucucugaaaucacugagcaggagaaagauuuucuauggagucacagacacuauuguguaacuauccccgaaauucuacccaaauugcuucugucuguuaaauggaauucuagagaugaaguagcccagauguauugcuugguaaaagauuggccuccaaucaaaccugaacaggcuauggaacuucuggacuguaauuacccagauccuaugguucgagguuuugcuguucggugcuuggaaaaauauuuaacagaugacaaacuuucucaguauuuaauucagcuaguacagguccuaaaauaugaacaauauuuggauaacuugcuugugagauuuuuacugaagaaagcauugacuaaucaaaggauugggcacuuuuucuuuuggcauuuaaaaucugagaugcacaauaaaacaguuagccagagguuuggccugcuuuuggaguccuauugucgugcaugugggauguauuugaagcaccugaauaggcaagucgaggcaauggaaaagcucauuaacuuaacugacauucucaaacaggagaagaaggaugaaacacaaaagguacagaugaaguuuuuaguugagcaaaugaggcgaccagauuucauggaugcucuacagggcuuucugucuccucuaaacccugcucaucaacuaggaaaccucaggcuugaagagugucgaauuauguccucugcaaaaaggccacugugguugaauugggagaacccagacaucaugucagaguuacuguuucagaacaaugagaucaucuuuaaaaauggggaugauuuacggcaagauaugcuaacacuucaaauuauucguauuauggaaaauaucuggcaaaaucaaggucuugaucuucgaauguuaccuuaugguugucugucaaucggugacugugugggacuuauugagguggugcgaaauucucacacuauuaugcaaauucagugcaaaggcggcuugaaaggugcacugcaguucaacagccacacacuacaucaguggcucaaagacaagaacaaaggagaaauauaugaugcagccauugaccuguuuacacguucaugugcuggauacuguguagcuaccuucauuuugggaauuggagaucgucacaauaguaacaucauggugaaagacgauggacagcuguuucauauagauuuuggacacuuuuuggaucacaagaagaaaaaauuugguuauaaacgagaacgugugccauuuguuuugacacaggauuucuuaauagugauuaguaaaggagcccaagaaugcacaaagacaagagaauuugagagguuucaggagauguguuacaaggcuuaucuagcuauucgacagcaugccaaucucuucauaaaucuuuucucaaugaugcuuggcucuggaaugccagaacuacaaucuuuugaugacauugcauacauucgaaagacccuagccuuagauaaaacugagcaagaggcuuuggaguauuucaugaaacaaaugaaugaugcacaucaugguggcuggacaacaaaaauggauuggaucuuccacacaauuaaacagcaugcauugaacuga

SEQ ID NO: 9209 - RNA, 3207 nt, Artificial Sequence
  derived and/or modified sequence opt1 from PI3K__Homo_sapiens__AAB39753
augcccccgcgccccagcuccggcgagcugugggggauccaccucaugccgccccggauccugguggagugccugcuccccaacggcaugaucgucacccuggagugccugcgcgaggccacccucaucacgaucaagcacgagcuguucaaggaggcccggaaguacccccugcaccagcuccugcaggacgagagcuccuacaucuucgugagcgugacccaggaggcggagcgcgaggaguucuucgacgagacccggcgccugugcgaccuccggcuguuccagcccuuccugaaggucaucgagcccguggggaaccgcgaggagaagauccucaaccgggagaucggcuucgccaucgggaugccggugugcgaguucgacauggucaaggaccccgaggugcaggacuuccgccggaacauccugaacgugugcaaggaggccgucgaccugcgcgaccucaacagcccccacagccgggccauguacguguacccgcccaacguggaguccagccccgagcugcccaagcacaucuacaacaagcuggacaagggccagaucaucgucgugaucugggugaucgucucccccaacaacgacaagcagaaguacacccucaagaucaaccacgacugcgugccggagcaggucaucgccgaggcgauccgcaagaagacgcggagcaugcugcuguccagcgagcagcucaagcugugcgugcuggaguaccagggcaaguacauccucaaggugugcgggugcgacgaguacuuccuggagaaguacccccugucccaguacaaguacauccgcagcugcaucaugcucggccggaugcccaaccugaugcugauggccaaggagucccucuacagccagcugcccauggacugcuucaccaugccguccuacagccgccggaucuccaccgccacccccuacaugaacggggagacgagcaccaagagccugugggugaucaacuccgcccuccgcaucaagauccugugcgcgaccuacgucaacgugaacauccgggacaucgacaagaucuacgugcgcaccggcaucuaccacgggggcgagccccugugcgacaacgucaacacgcagcgcgugcccugcagcaacccgcgguggaacgaguggcucaacuacgacaucuacauccccgaccugccccgcgccgcccggcugugccucuccaucugcagcgucaagggccgcaagggggccaaggaggagcacugcccccuggccuggggcaacaucaaccuguucgacuacaccgacacccucguguccgggaagauggcgcugaaccuguggccggugccccacggccucgaggaccugcugaaccccaucggcgucaccgggagcaacccgaacaaggagacgcccugccuggagcucgaguucgacugguucuccagcguggugaaguuccccgacauguccgucaucgaggagcacgccaacuggagcgugucccgggaggccggcuucagcuacucccacgccgggcugagcaaccgccuggcccgggacaacgagcuccgcgagaacgacaaggagcagcugaaggcgaucuccacccgggacccccugagcgagaucaccgagcaggagaaggacuuccucuggucccaccgccacuacugcgugaccaucccggagauccugcccaagcugcuccugagcgucaaguggaacucccgggacgagguggcccagauguacugccuggugaaggacuggccgcccaucaagcccgagcaggccauggagcuccuggacugcaacuaccccgaccccaugguccgcggcuucgccgugcggugccuggagaaguaccucacggacgacaagcugagccaguaccugauccagcucgugcagguccugaaguacgagcaguaccuggacaaccuccuggugcgcuuccugcucaagaaggcccugaccaaccagcggaucgggcacuucuucuucuggcaccugaaguccgagaugcacaacaagaccgugucccagcgcuucggccuccugcuggagagcuacugccgggcgugcggcauguaccucaagcaccugaaccgccaggucgaggccauggagaagcugaucaaccucaccgacauccugaagcaggagaagaaggacgagacgcagaaggugcagaugaaguuccugguggagcagaugcggcgccccgacuucauggacgcccuccagggguuccuguccccgcugaaccccgcccaccagcucggcaaccugcgccuggaggagugccggaucaugagcuccgccaagcgcccccucuggcugaacugggagaaccccgacaucaugagcgagcuccucuuccagaacaacgagaucaucuucaagaacggggacgaccugcggcaggacaugcugacccuccagaucauccgcaucauggagaacaucuggcagaaccagggccuggaccugcggaugcucccguacgggugccuguccaucggcgacugcgucggccugaucgagguggugcgcaacagccacaccaucaugcagauccagugcaagggcgggcucaagggggcgcugcaguucaacucccacacccugcaccaguggcucaaggacaagaacaagggcgagaucuacgacgccgccaucgaccuguucacgcggagcugcgccggguacugcgucgcgaccuucauccugggcaucggcgaccgccacaacuccaacaucauggugaaggacgacgggcagcuguuccacaucgacuucggccacuuccuggaccacaagaagaagaaguucggguacaagcgggagcgcgugcccuucguccugacccaggacuuccucaucgugaucagcaagggcgcccaggagugcaccaagacgcgggaguucgagcgcuuccaggagaugugcuacaaggccuaccuggccauccggcagcacgccaaccuguucaucaaccucuucuccaugaugcugggcagcgggaugcccgagcugcaguccuucgacgacaucgcguacauccgcaagacccucgcccuggacaagaccgagcaggaggcccuggaguacuucaugaagcagaugaacgacgcccaccacggcggguggaccacgaagauggacuggaucuuccacaccaucaagcagcacgcccucaacuga

SEQ ID NO: 9210 - RNA, 3207 nt, Artificial Sequence
  derived and/or modified sequence opt2 from PI3K__Homo_sapiens__AAB39753
augcccccccgccccuccuccggcgagcucuggggcauccaccucaugcccccccgcauccucgucgagugccuccuccccaacggcaugaucgucacccucgagugccuccgcgaggccacccucaucaccaucaagcacgagcucuucaaggaggcccgcaaguacccccuccaccagcuccuccaggacgaguccuccuacaucuucgucuccgucacccaggaggccgagcgcgaggaguucuucgacgagacccgccgccucugcgaccuccgccucuuccagcccuuccucaaggucaucgagcccgucggcaaccgcgaggagaagauccucaaccgcgagaucggcuucgccaucggcaugcccgucugcgaguucgacauggucaaggaccccgagguccaggacuuccgccgcaacauccucaacgucugcaaggaggccgucgaccuccgcgaccucaacuccccccacucccgcgccauguacgucuacccccccaacgucgaguccucccccgagcuccccaagcacaucuacaacaagcucgacaagggccagaucaucgucgucaucugggucaucgucucccccaacaacgacaagcagaaguacacccucaagaucaaccacgacugcguccccgagcaggucaucgccgaggccauccgcaagaagacccgcuccaugcuccucuccuccgagcagcucaagcucugcguccucgaguaccagggcaaguacauccucaaggucugcggcugcgacgaguacuuccucgagaaguacccccucucccaguacaaguacauccgcuccugcaucaugcucggccgcaugcccaaccucaugcucauggccaaggagucccucuacucccagcuccccauggacugcuucaccaugcccuccuacucccgccgcaucuccaccgccacccccuacaugaacggcgagaccuccaccaagucccucugggucaucaacuccgcccuccgcaucaagauccucugcgccaccuacgucaacgucaacauccgcgacaucgacaagaucuacguccgcaccggcaucuaccacggcggcgagccccucugcgacaacgucaacacccagcgcguccccugcuccaacccccgcuggaacgaguggcucaacuacgacaucuacauccccgaccucccccgcgccgcccgccucugccucuccaucugcuccgucaagggccgcaagggcgccaaggaggagcacugcccccucgccuggggcaacaucaaccucuucgacuacaccgacacccucgucuccggcaagauggcccucaaccucuggcccgucccccacggccucgaggaccuccucaaccccaucggcgucaccggcuccaaccccaacaaggagacccccugccucgagcucgaguucgacugguucuccuccgucgucaaguuccccgacauguccgucaucgaggagcacgccaacugguccgucucccgcgaggccggcuucuccuacucccacgccggccucuccaaccgccucgcccgcgacaacgagcuccgcgagaacgacaaggagcagcucaaggccaucuccacccgcgacccccucuccgagaucaccgagcaggagaaggacuuccucuggucccaccgccacuacugcgucaccauccccgagauccuccccaagcuccuccucuccgucaaguggaacucccgcgacgaggucgcccagauguacugccucgucaaggacuggccccccaucaagcccgagcaggccauggagcuccucgacugcaacuaccccgaccccaugguccgcggcuucgccguccgcugccucgagaaguaccucaccgacgacaagcucucccaguaccucauccagcucguccagguccucaaguacgagcaguaccucgacaaccuccucguccgcuuccuccucaagaaggcccucaccaaccagcgcaucggccacuucuucuucuggcaccucaaguccgagaugcacaacaagaccgucucccagcgcuucggccuccuccucgaguccuacugccgcgccugcggcauguaccucaagcaccucaaccgccaggucgaggccauggagaagcucaucaaccucaccgacauccucaagcaggagaagaaggacgagacccagaagguccagaugaaguuccucgucgagcagaugcgccgccccgacuucauggacgcccuccagggcuuccucuccccccucaaccccgcccaccagcucggcaaccuccgccucgaggagugccgcaucauguccuccgccaagcgcccccucuggcucaacugggagaaccccgacaucauguccgagcuccucuuccagaacaacgagaucaucuucaagaacggcgacgaccuccgccaggacaugcucacccuccagaucauccgcaucauggagaacaucuggcagaaccagggccucgaccuccgcaugcuccccuacggcugccucuccaucggcgacugcgucggccucaucgaggucguccgcaacucccacaccaucaugcagauccagugcaagggcggccucaagggcgcccuccaguucaacucccacacccuccaccaguggcucaaggacaagaacaagggcgagaucuacgacgccgccaucgaccucuucacccgcuccugcgccggcuacugcgucgccaccuucauccucggcaucggcgaccgccacaacuccaacaucauggucaaggacgacggccagcucuuccacaucgacuucggccacuuccucgaccacaagaagaagaaguucggcuacaagcgcgagcgcguccccuucguccucacccaggacuuccucaucgucaucuccaagggcgcccaggagugcaccaagacccgcgaguucgagcgcuuccaggagaugugcuacaaggccuaccucgccauccgccagcacgccaaccucuucaucaaccucuucuccaugaugcucggcuccggcaugcccgagcuccaguccuucgacgacaucgccuacauccgcaagacccucgcccucgacaagaccgagcaggaggcccucgaguacuucaugaagcagaugaacgacgcccaccacggcggcuggaccaccaagauggacuggaucuuccacaccaucaagcagcacgcccucaacuga

SEQ ID NO: 9211 - RNA, 3207 nt, Artificial Sequence
  derived and/or modified sequence opt3 from PI3K__Homo_sapiens__AAB39753
augcccccuagaccaagcuccggcgagcugugggggauccaccucaugccgcccaggauucuuguggaaugccuguugccuaacggaaugauagucaccuuagagugucugcgggaagccacacuaaucacuauuaagcaugaacucuucaaagaagcucgcaaguacccacugcaccagcuucugcaagacgagucuucauauaucuuuguuagugugacgcaggaggcagaacgagaggaguucuuugaugagacccguagauugugcgaccucaggcuguuccagcccuuucugaaaguaauugagccuguggguaaucgggaagagaagauccucaaccgcgaaauaggcuucgccaucgggaugccagucugugaguuugauauggugaaagaccccgaaguucaggauuucagaaggaauauuuuaaacgugugcaaggaggcggucgaccugcgggaucuuaauagcccucauucccgcgcuauguacguguauccaccgaacguagagucuucgcccgaauugccuaagcacaucuacaauaaacuggacaagggacaaauuaucguugugauaugggucauugugucaccaaacaaugauaaacagaaguauacacuaaaaaucaaccaugacugugugcccgagcaggucauugccgaagcaauccgaaagaagacuagaagcaugcuccugaguuccgagcagcuuaaacugugcguuuuggaauaccaaggcaaguauauccucaaagugugugguugcgaugaguacuuucuggagaaguacccuuuaucucaguauaaauacauuaggagcuguauaaugcuggggcggaugccaaaucucaugcuuauggccaaggaaucccuguauucacaguugcccauggacugcuucaccaugccgaguuacagccgucgcaucucuacagcuaccccuuauaugaacggagagacuuccacaaaaucacuauggguaauuaauagcgcacugagaaucaagauacucugugccaccuacgugaacgucaauauuagggauaucgacaagaucuaugugcggacgggcauuuaccacggcggggaaccccugugcgacaacguuaacacucagcgagugccaugcaguaauccucgcuggaacgaguggcuuaauuacgauaucuauauucccgaccugccaagagcugccagguugugucucucuauaugcuccgucaaaggacggaagggugcgaaagaagaacacuguccccuggcauggggcaacaucaauuuauuugauuacaccgacacacuggugagcgggaagauggcccuaaaccucuggccuguaccacauggacuggaggaucuuuugaauccgauuggcguuacugguucgaaccccaauaaagaaaccccuugccuggagcucgaguucgacugguuuucuuccguggucaaguucccagauaugucagugaucgaggagcacgcuaacuggagugucagccgcgaagccggguucuccuauucucaugcaggacugagcaauagacuugcuagggacaacgagcugcgugaaaaugauaaggagcaauugaaagccaucucaacacgggacccccucagugaaauuaccgagcaggagaaggauuuucuguggucccaccgacacuacugugugacgauaccugaaaucuuaccaaaacugcuacucagcguuaaguggaacucuagagacgagguggcgcagauguauugccugguaaaagacuggcccccgauuaagccugaacaagccauggagcuuuuggauuguaauuacccagaccccauggucaggggcuucgcagugcgcugccuggaaaaguaucucacugaugacaaacugucacaguacuuaauccagcugguucaggugcuuaaguacgagcaauauuuggauaaccuccugguccgguuucuacugaaaaaggcucucacaaaccagagaauuggccauuucuuuuucuggcaccugaaaagugagaugcauaauaagaccgugagccagagguuugggcuuuugcuggaauccuacugucgcgccugcggaauguauuuaaagcaccucaaccgacagguagaggcuauggaaaaacugaucaaucuuacugacauacugaagcaagagaaaaaggaugaaacacagaaagugcagaugaaguucuugguugagcagaugcggcguccugacuuuauggaugcccuccaagguuuccugucuccccuaaacccagcacaucagcugggcaaucucagacuggaggaauguaggaucaugucgagcgccaaacgcccucuuugguugaacugggagaaucccgacauuauguccgaacuguuauuucagaacaaugagaucauuuucaagaacggggaugaccuccggcaggauaugcugacccuucaaaucauaagaauuauggagaauaucuggcagaaccagggacuggaccuaaggaugcucccauacggcugccugucaauuggugacugcgucggguugaucgaaguggugcgaaauagucacacgauaaugcaaauccaguguaagggcggacugaaaggcgcuuuacaguuuaacucucacacccuccaucaguggcugaaggauaaaaauaagggggagauuuaugacgcggcaaucgaucuuuucacacgcagcugcgccggauacugugucgcuacuuucauucuggguaucggcgaccggcacaacuccaacauaaugguuaaagaugacgggcaauuguuucauauugauuucggacacuuucucgaccacaagaagaaaaaguucggcuauaaaagagaaagggugccguuugugcugacccaggauuuccuaaucguaaucucaaagggugcccaggagugcacaaaaacucgugaauuugagcgcuuccaggagauguguuacaaggcauaccuggccauucggcaacaugcuaaucuuuuuaucaaccucuucagcaugaugcuggggucuggcaugccugaauugcaguccuuugacgauauugccuauauaagaaagacccuggcauuagacaaaacagagcaggaagcgcucgaguacuucaugaagcagaugaaugaugcucaccauggaggcuggaccacuaaaauggacuggaucuuucacacgauuaagcaacaugcccugaacuga

SEQ ID NO: 9212 - RNA, 3207 nt, Artificial Sequence
  derived and/or modified sequence opt4 from PI3K__Homo_sapiens__AAB39753
augccccccagacccagcagcggcgagcuguggggcauccaccugaugccccccagaauccugguggagugccugcugcccaacggcaugaucgugacccuggagugccugagagaggccacccugaucaccaucaagcacgagcuguucaaggaggccagaaaguacccccugcaccagcugcugcaggacgagagcagcuacaucuucgugagcgugacccaggaggccgagagagaggaguucuucgacgagaccagaagacugugcgaccugagacuguuccagcccuuccugaaggugaucgagcccgugggcaacagagaggagaagauccugaacagagagaucggcuucgccaucggcaugcccgugugcgaguucgacauggugaaggaccccgaggugcaggacuucagaagaaacauccugaacgugugcaaggaggccguggaccugagagaccugaacagcccccacagcagagccauguacguguacccccccaacguggagagcagccccgagcugcccaagcacaucuacaacaagcuggacaagggccagaucaucguggugaucugggugaucgugagccccaacaacgacaagcagaaguacacccugaagaucaaccacgacugcgugcccgagcaggugaucgccgaggccaucagaaagaagaccagaagcaugcugcugagcagcgagcagcugaagcugugcgugcuggaguaccagggcaaguacauccugaaggugugcggcugcgacgaguacuuccuggagaaguacccccugagccaguacaaguacaucagaagcugcaucaugcugggcagaaugcccaaccugaugcugauggccaaggagagccuguacagccagcugcccauggacugcuucaccaugcccagcuacagcagaagaaucagcaccgccacccccuacaugaacggcgagaccagcaccaagagccugugggugaucaacagcgcccugagaaucaagauccugugcgccaccuacgugaacgugaacaucagagacaucgacaagaucuacgugagaaccggcaucuaccacggcggcgagccccugugcgacaacgugaacacccagagagugcccugcagcaaccccagauggaacgaguggcugaacuacgacaucuacauccccgaccugcccagagccgccagacugugccugagcaucugcagcgugaagggcagaaagggcgccaaggaggagcacugcccccuggccuggggcaacaucaaccuguucgacuacaccgacacccuggugagcggcaagauggcccugaaccuguggcccgugccccacggccuggaggaccugcugaaccccaucggcgugaccggcagcaaccccaacaaggagacccccugccuggagcuggaguucgacugguucagcagcguggugaaguuccccgacaugagcgugaucgaggagcacgccaacuggagcgugagcagagaggccggcuucagcuacagccacgccggccugagcaacagacuggccagagacaacgagcugagagagaacgacaaggagcagcugaaggccaucagcaccagagacccccugagcgagaucaccgagcaggagaaggacuuccuguggagccacagacacuacugcgugaccauccccgagauccugcccaagcugcugcugagcgugaaguggaacagcagagacgagguggcccagauguacugccuggugaaggacuggccccccaucaagcccgagcaggccauggagcugcuggacugcaacuaccccgaccccauggugagaggcuucgccgugagaugccuggagaaguaccugaccgacgacaagcugagccaguaccugauccagcuggugcaggugcugaaguacgagcaguaccuggacaaccugcuggugagauuccugcugaagaaggcccugaccaaccagagaaucggccacuucuucuucuggcaccugaagagcgagaugcacaacaagaccgugagccagagauucggccugcugcuggagagcuacugcagagccugcggcauguaccugaagcaccugaacagacagguggaggccauggagaagcugaucaaccugaccgacauccugaagcaggagaagaaggacgagacccagaaggugcagaugaaguuccugguggagcagaugagaagacccgacuucauggacgcccugcagggcuuccugagcccccugaaccccgcccaccagcugggcaaccugagacuggaggagugcagaaucaugagcagcgccaagagaccccuguggcugaacugggagaaccccgacaucaugagcgagcugcuguuccagaacaacgagaucaucuucaagaacggcgacgaccugagacaggacaugcugacccugcagaucaucagaaucauggagaacaucuggcagaaccagggccuggaccugagaaugcugcccuacggcugccugagcaucggcgacugcgugggccugaucgagguggugagaaacagccacaccaucaugcagauccagugcaagggcggccugaagggcgcccugcaguucaacagccacacccugcaccaguggcugaaggacaagaacaagggcgagaucuacgacgccgccaucgaccuguucaccagaagcugcgccggcuacugcguggccaccuucauccugggcaucggcgacagacacaacagcaacaucauggugaaggacgacggccagcuguuccacaucgacuucggccacuuccuggaccacaagaagaagaaguucggcuacaagagagagagagugcccuucgugcugacccaggacuuccugaucgugaucagcaagggcgcccaggagugcaccaagaccagagaguucgagagauuccaggagaugugcuacaaggccuaccuggccaucagacagcacgccaaccuguucaucaaccuguucagcaugaugcugggcagcggcaugcccgagcugcagagcuucgacgacaucgccuacaucagaaagacccuggcccuggacaagaccgagcaggaggcccuggaguacuucaugaagcagaugaacgacgcccaccacggcggcuggaccaccaagauggacuggaucuuccacaccaucaagcagcacgcccugaacuga

SEQ ID NO: 9213 - RNA, 3207 nt, Artificial Sequence
  derived and/or modified sequence opt5 from PI3K__Homo_sapiens__AAB39753
augcccccuagaccgagcuccggcgagcugugggggauccaccucaugcccccucggauucugguggaaugccuucugcccaacggaaugaucgucacccucgagugucugcgcgaagccacacuuauuacgaucaagcaugagcuguucaaagaagcuagaaaguacccucuccaccagcugcugcaagacgagucuagcuauauuuuuguuuccgugacccaggaggccgaacgggaggaguucuuugaugagacacgcagacucugcgaccugcggcuuuuccagcccuuucugaaagugaucgagccugucggcaaucgcgaagagaagauccucaacagagaaauuggguucgcgaucggaaugccggugugugaguuugauaugguuaaagaccccgaagugcaggauuuccggcgcaauauucugaacgucugcaaggaggcuguggaccuuagagaucucaauucuccucauagccgggccauguacguuuaucccccuaacguggaguccucucccgaacugccgaagcacaucuacaauaaacuggacaagggccaaauuaucgucgugauuugggugaucgucagcccuaacaaugauaaacagaaguauacccugaaaaucaaccaugacuguguucccgaacaggugauugccgaagcuauccgcaagaagacaagauccaugcuccugagcucugagcagcuuaaacugugcgugcucgaauaccaagggaaguauauucugaaagucuguggaugcgaugaguacuuucuugagaaguacccucugucccaguauaaauacauccggagcuguauuaugcucggccgcaugcccaaucugaugcugauggccaaggaaucucucuauucccagcugcccauggacugcuucaccaugccuagcuacucuagacggaucuccacagcuaccccguauaugaacggcgagacgagcaccaaaucccuuugggugaucaauucugcccugagaauuaagauccucugugcgacauacguuaacgugaauauucgcgauaucgacaagauuuauguccggaccgggaucuaccacggaggcgaaccccugugcgacaacgugaacacacagagaguuccuugcagcaauccccgcuggaacgaguggcuuaauuacgauaucuauauuccugaccugccccgggccgcuagacucugucuguccaucugcagcgugaaagggcgcaagggagccaaagaagaacacuguccgcuggcuuggggcaacauuaaucucuuugauuacaccgacacgcuggucucugggaagauggcccuuaaccuguggccugugccccauggacucgaggaucugcugaauccuaucggcgucacaggcuccaaccccaauaaagaaaccccuugccuugagcucgaguucgacugguuuagcucugugguuaaguuccccgauaugagcgugauugaggagcacgcgaacugguccgucucucgggaagccggguucagcuauucccaugcuggacugagcaauagacuggcccgcgacaacgagcuccgggaaaaugauaaggagcaacugaaagcuaucucuacaagagacccgcuuuccgaaauuaccgagcaggagaaggauuuucuguggagccaccgccacuacugugugaccaucccugaaauccuccccaaacugcugcuuucuguuaaguggaacucccgggacgagguggcccagauguauugccucgucaaagacuggcccccuauuaagccggaacaagccauggagcugcuggauuguaauuaccccgacccuauggugagaggcuucgcugugcggugccucgaaaaguaucugacagaugacaaacuuagccaguaccugauccagcucguucagguccugaaguacgagcaauaucuggauaaccuucucgugcgcuuucugcugaaaaaggcgcucacgaaccagagaauugggcauuucuuuuucuggcaccugaaauccgagaugcauaauaagaccgugucucagcgguuuggacuucugcucgaaagcuacuguagagccugcggcauguaucugaagcaccugaaccgccaggucgaggcuauggaaaaacuuaucaaucucacagacauucugaagcaagagaaaaaggaugaaacccagaaagugcagaugaaguuccugguugagcagaugcggagacccgacuuuauggaugcccuccaaggguuccuguccccucuuaaccccgcccaucagcugggaaaucuccgccuggaggaauguagaaucaugucuagcgcuaaacggccucuguggcuuaacugggagaaucccgacaucauguccgaacugcucuuucagaacaaugagauuaucuucaagaacggcgaugaccugcgccaggauaugcucacacugcaaauuaucagaauuauggagaauaucuggcagaaccagggccuugaccugcggaugcucccguacgggugccugagcaucggagacugcgugggccugauugaagucgugcgcaauucucacaccaucaugcaaauucaguguaaagggggacuuaagggcgcccugcaguuuaacucccacacgcuccaucaguggcugaaggauaaaaauaagggggagaucuaugacgcggcuauugaucucuucacaagaagcugcgccggcuacuguguugccaccuucauccugggaaucggcgaccggcacaacucuaacauuauggugaaagaugacgggcaacuuuuucauaucgauuucggacacuuucuggaccacaagaagaaaaaguucggcuauaaacgcgaaagagucccuuuugugcucacccaggauuuccugauuguuaucuccaagggggcucaggagugcacaaaaacccgggaauuugagcgcuuccaggagauguguuacaaggccuaccuggcuauuagacaacaugccaaucuuuuuaucaaccuguucagcaugaugcucggaucuggcaugcccgaacugcagagcuuugacgauauugcguauauccggaagacacucgcccuggacaaaacggagcaggaagcucuugaguacuucaugaagcagaugaaugaugcccaccaugggggcuggaccacaaaaauggacuggaucuuucacaccauuaagcaacaugcucugaacuga

SEQ ID NO: 9214 - protein, 1070 aa, Artificial Sequence
  PI3K__Homo_sapiens__P42338
MCFSFIMPPAMADILDIWAVDSQIASDGSIPVDFLLPTGIYIQLEVPREATISYIKQMLWKQVHNYPMFNLLMDIDSYMFACVNQTAVYEELEDETRRLCDVRPFLPVLKLVTRSCDPGEKLDSKIGVLIGKGLHEFDSLKDPEVNEFRRKMRKFSEEKILSLVGLSWMDWLKQTYPPEHEPSIPENLEDKLYGGKLIVAVHFENCQDVFSFQVSPNMNPIKVNELAIQKRLTIHGKEDEVSPYDYVLQVSGRVEYVFGDHPLIQFQYIRNCVMNRALPHFILVECCKIKKMYEQEMIAIEAAINRNSSNLPLPLPPKKTRIISHVWENNNPFQIVLVKGNKLNTEETVKVHVRAGLFHGTELLCKTIVSSEVSGKNDHIWNEPLEFDINICDLPRMARLCFAVYAVLDKVKTKKSTKTINPSKYQTIRKAGKVHYPVAWVNTMVFDFKGQLRTGDIILHSWSSFPDELEEMLNPMGTVQTNPYTENATALHVKFPENKKQPYYYPPFDKIIEKAAEIASSDSANVSSRGGKKFLPVLKEILDRDPLSQLCENEMDLIWTLRQDCREIFPQSLPKLLLSIKWNKLEDVAQLQALLQIWPKLPPREALELLDFNYPDQYVREYAVGCLRQMSDEELSQYLLQLVQVLKYEPFLDCALSRFLLERALGNRRIGQFLFWHLRSEVHIPAVSVQFGVILEAYCRGSVGHMKVLSKQVEALNKLKTLNSLIKLNAVKLNRAKGKEAMHTCLKQSAYREALSDLQSPLNPCVILSELYVEKCKYMDSKMKPLWLVYNNKVFGEDSVGVIFKNGDDLRQDMLTLQMLRLMDLLWKEAGLDLRMLPYGCLATGDRSGLIEVVSTSETIADIQLNSSNVAAAAAFNKDALLNWLKEYNSGDDLDRAIEEFTLSCAGYCVASYVLGIGDRHSDNIMVKKTGQLFHIDFGHILGNFKSKFGIKRERVPFILTYDFIHVIQQGKTGNTEKFGRFRQCCEDAYLILRRHGNLFITLFALMLTAGLPELTSVKDIQYLKDSLALGKSEEEALKQFKQKFDEALRESWTTKVNWMAHTVRKDYRS

SEQ ID NO: 9215 - RNA, 3213 nt, Artificial Sequence
  PI3K__Homo_sapiens__AAB29081
augugcuucaguuucauaaugccuccugcuauggcagacauccuugacaucugggcgguggauucacagauagcaucugauggcuccauaccuguggauuuccuuuugcccacugggauuuauauccaguuggagguaccucgggaagcuaccauuucuuauauuaagcagauguuauggaagcaaguucacaauuacccaauguucaaccuccuuauggauauugacuccuauauguuugcaugugugaaucagacugcuguauaugaggagcuugaagaugaaacacgaagacucugugaugucagaccuuuucuuccaguucucaaauuagugacaagaaguugugacccaggggaaaaauuagacucaaaaauuggaguccuuauaggaaaaggucugcaugaauuugauuccuugaaggauccugaaguaaaugaauuucgaagaaaaaugcgcaaauucagcgaggaaaaaauccugucacuugugggauugucuuggauggacuggcuaaaacaaacauauccaccagagcaugaaccauccaucccugaaaacuuagaagauaaacuuuaugggggaaagcucaucguagcuguucauuuugaaaacugccaggacguguuuagcuuucaagugucuccuaauaugaauccuaucaaaguaaaugaauuggcaauccaaaaacguuugacuauucaugggaaggaagaugaaguuagccccuaugauuauguguugcaagucagcgggagaguagaauauguuuuuggugaucauccacuaauucaguuccaguauauccggaacugugugaugaacagagcccugccccauuuuauacuuguggaaugcugcaagaucaagaaaauguaugaacaagaaaugauugccauagaggcugccauaaaucgaaauucaucuaaucuuccucuuccauuaccaccaaagaaaacacgaauuauuucucauguuugggaaaauaacaacccuuuccaaauugucuugguuaagggaaauaaacuuaacacagaggaaacuguaaaaguucaugucagggcuggucuuuuucaugguacugagcuccuguguaaaaccaucguaagcucagagguaucagggaaaaaugaucauauuuggaaugaaccacuggaauuugauauuaauauuugugacuuaccaagaauggcucgauuauguuuugcuguuuaugcaguuuuggauaaaguaaaaacgaagaaaucaacgaaaacuauuaaucccucuaaauaucagaccaucaggaaagcuggaaaagugcauuauccuguagcguggguaaauacgaugguuuuugacuuuaaaggacaauugagaacuggagacauaauauuacacagcuggucuucauuuccugaugaacucgaagaaauguugaauccaaugggaacuguucaaacaaauccauauacugaaaaugcaacagcuuugcauguuaaauuuccagagaauaaaaaacaaccuuauuauuacccucccuucgauaagauuauugaaaaggcagcugagauugcaagcagugauagugcuaaugugucaagucgagguggaaaaaaguuucuuccuguauugaaagaaaucuuggacagggaucccuugucucaacugugugaaaaugaaauggaucuuauuuggacuuugcgacaagacugccgagagauuuucccacaaucacugccaaaauuacugcugucaaucaaguggaauaaacuugaggauguugcucagcuucaggcgcugcuucagauuuggccuaaacugcccccccgggaggcccuagagcuucuggauuucaacuauccagaccaguacguucgagaauaugcuguaggcugccugcgacagaugagugaugaagaacuuucucaauaucuuuuacaacuggugcaaguguuaaaauaugagccuuuucuugauugugcccucucuagauuccuauuagaaagagcacuugguaaucggaggauagggcaguuucuauuuuggcaucuuaggucagaagugcacauuccugcugucucaguacaauuuggugucauccuugaagcauacugccggggaaguguggggcacaugaaagugcuuucuaagcagguugaagcacucaauaaguuaaaaacuuuaaauaguuuaaucaaacugaaugccgugaaguuaaacagagccaaagggaaggaggccaugcauaccuguuuaaaacagagugcuuaccgggaagcccucucugaccugcagucaccccugaacccauguguuauccucucagaacucuauguugaaaagugcaaauacauggauuccaaaaugaagccuuuguggcugguauacaauaacaagguauuuggugaggauucaguuggagugauuuuuaaaaauggugaugauuuacgacaggauauguugacacuccaaauguugcgcuugauggauuuacucuggaaagaagcugguuuggaucuucggauguugccuuauggcuguuuagcaacaggagaucgcucuggccucauugaaguugugagcaccucugaaacaauugcugacauucagcugaacaguagcaauguggcugcugcagcagccuucaacaaagaugcccuucugaacuggcuuaaagaauacaacucuggggaugaccuggaccgagccauugaggaauuuacacuguccugugcuggcuacuguguagcuucuuauguccuugggauuggugacagacauagugacaacaucauggucaaaaaaacuggccagcucuuccacauugacuuuggacauauucuuggaaauuucaaaucuaaguuuggcauuaaaagggagcgagugccuuuuauucuuaccuaugauuucauccaugucauucaacaaggaaaaacaggaaauacagaaaaguuuggccgguuccgccaguguugugaggaugcauaucugauuuuacgacggcaugggaaucucuucaucacucucuuugcgcugauguugacugcagggcuuccugaacucacaucagucaaagauauacaguaucuuaaggacucucuugcauuagggaagagugaagaagaagcacucaaacaguuuaagcaaaaauuugaugaggcgcucagggaaagcuggacuacuaaagugaacuggauggcccacacaguucggaaagacuacagaucuuaa

SEQ ID NO: 9216 - RNA, 3213 nt, Artificial Sequence
  derived and/or modified sequence opt1 from PI3K__Homo_sapiens__AAB29081
augugcuucagcuucaucaugcccccggccauggccgacauccuggacaucugggcgguggacucccagaucgccagcgacggcuccauccccgucgacuuccuccugcccaccgggaucuacauccagcuggaggugccccgcgaggccaccaucagcuacaucaagcagaugcucuggaagcagguccacaacuacccgauguucaaccugcugauggacaucgacuccuacauguucgccugcgugaaccagacggccguguacgaggagcucgaggacgagacccggcgccugugcgacgugcggcccuuccugcccguccucaagcuggugacccgcagcugcgaccccggcgagaagcuggacuccaagaucggggugcucaucggcaaggggcugcacgaguucgacagccugaaggacccggaggucaacgaguuccggcgcaagaugcggaaguucuccgaggagaagauccucagccuggugggccuguccuggauggacuggcucaagcagaccuacccgcccgagcacgagcccagcauccccgagaaccuggaggacaagcuguacggcgggaagcucaucguggcgguccacuucgagaacugccaggacguguucuccuuccaggugagccccaacaugaaccccaucaaggucaacgagcuggccauccagaagcgccugacgauccacggcaaggaggacgaggugucccccuacgacuacgugcuccaggucagcgggcggguggaguacguguucggcgaccacccgcugauccaguuccaguacauccgcaacugcgucaugaaccgggcccugccccacuucauccucguggagugcugcaagaucaagaagauguacgagcaggagaugaucgccaucgaggcggccaucaaccgcaacuccagcaaccugccccugccccucccgcccaagaagacccggaucaucucccacgugugggagaacaacaaccccuuccagaucguccuggugaaggggaacaagcugaacaccgaggagaccgucaaggugcacgugcgcgccggccucuuccacggcacggagcugcugugcaagaccaucgucagcagcgagguguccgggaagaacgaccacaucuggaacgagccccucgaguucgacaucaacaucugcgaccugccgcggauggcccgccugugcuucgccguguacgcgguccucgacaaggugaagaccaagaaguccaccaagacgaucaaccccagcaaguaccagaccauccggaaggccggcaaggugcacuaccccgucgccugggugaacaccaugguguucgacuucaaggggcagcugcgcaccggcgacaucauccugcacagcugguccagcuuccccgacgagcucgaggagaugcugaacccgaugggcacgguccagaccaaccccuacaccgagaacgccaccgcccugcacgugaaguuccccgagaacaagaagcagccguacuacuacccgcccuucgacaagaucaucgagaaggcggccgagaucgccuccagcgacuccgccaacgugagcucccgcgggggcaagaaguuccuccccguccugaaggagauccuggaccgggacccccucagccagcugugcgagaacgagauggaccugaucuggacgcugcggcaggacugccgcgagaucuucccccagucccuccccaagcugcugcucagcaucaaguggaacaagcuggaggacguggcccagcugcaggcgcuccugcagaucuggcccaagcugccgccccgcgaggcccucgagcugcuggacuucaacuaccccgaccaguacgugcgggaguacgccgucgggugccuccgccagauguccgacgaggagcugagccaguaccugcuccagcugguccaggugcugaaguacgagcccuuccucgacugcgcccugucccgguuccugcucgagcgcgcccugggcaaccggcgcaucgggcaguuccuguucuggcaccuccggagcgaggugcacaucccggcgguguccgugcaguucggcgucauccuggaggccuacugccgcggcagcguggggcacaugaaggugcugagcaagcaggucgaggcccucaacaagcugaagacccugaacucccucaucaagcugaacgccgugaagcugaaccgggcgaagggcaaggaggccaugcacacgugccucaagcagagcgccuaccgcgaggcccuguccgaccugcagagcccccucaaccccugcgugauccuguccgagcuguacgucgagaagugcaaguacauggacagcaagaugaagccccucuggcugguguacaacaacaagguguucggggaggacuccgucggcgugaucuucaagaacggggacgaccugcggcaggacaugcucacccugcagaugcugcgccucauggaccugcuguggaaggaggccggccucgaccugcggaugcugccguacggcugccucgcgacgggggaccgcagcggccugaucgagguggucuccaccagcgagaccaucgccgacauccagcugaacuccagcaacguggccgccgccgcggccuucaacaaggacgcccuccugaacuggcugaaggaguacaacuccggggacgaccucgaccgggccaucgaggaguucacccugagcugcgccggcuacugcguggcguccuacguccuggggaucggcgaccgccacagcgacaacaucauggugaagaagacgggccagcuguuccacaucgacuucgggcacauccucggcaacuucaaguccaaguucgggaucaagcgggagcgcgugcccuucauccugaccuacgacuucauccacgucauccagcagggcaagaccggcaacaccgagaaguucgggcgguuccgccagugcugcgaggacgccuaccucauccugcgccggcacggcaaccuguucaucacccucuucgcccugaugcugaccgccgggcuccccgagcugaccagcgugaaggacauccaguaccugaaggacagccucgcgcugggcaaguccgaggaggaggcccugaagcaguucaagcagaaguucgacgaggcccuccgcgagagcuggaccacgaaggugaacuggauggcccacaccguccggaaggacuaccgcuccuga

SEQ ID NO: 9217 - RNA, 3213 nt, Artificial Sequence
  derived and/or modified sequence opt2 from PI3K__Homo_sapiens__AAB29081
augugcuucuccuucaucaugccccccgccauggccgacauccucgacaucugggccgucgacucccagaucgccuccgacggcuccauccccgucgacuuccuccuccccaccggcaucuacauccagcucgaggucccccgcgaggccaccaucuccuacaucaagcagaugcucuggaagcagguccacaacuaccccauguucaaccuccucauggacaucgacuccuacauguucgccugcgucaaccagaccgccgucuacgaggagcucgaggacgagacccgccgccucugcgacguccgccccuuccuccccguccucaagcucgucacccgcuccugcgaccccggcgagaagcucgacuccaagaucggcguccucaucggcaagggccuccacgaguucgacucccucaaggaccccgaggucaacgaguuccgccgcaagaugcgcaaguucuccgaggagaagauccucucccucgucggccucuccuggauggacuggcucaagcagaccuacccccccgagcacgagcccuccauccccgagaaccucgaggacaagcucuacggcggcaagcucaucgucgccguccacuucgagaacugccaggacgucuucuccuuccaggucucccccaacaugaaccccaucaaggucaacgagcucgccauccagaagcgccucaccauccacggcaaggaggacgaggucucccccuacgacuacguccuccaggucuccggccgcgucgaguacgucuucggcgaccacccccucauccaguuccaguacauccgcaacugcgucaugaaccgcgcccucccccacuucauccucgucgagugcugcaagaucaagaagauguacgagcaggagaugaucgccaucgaggccgccaucaaccgcaacuccuccaaccucccccucccccucccccccaagaagacccgcaucaucucccacgucugggagaacaacaaccccuuccagaucguccucgucaagggcaacaagcucaacaccgaggagaccgucaagguccacguccgcgccggccucuuccacggcaccgagcuccucugcaagaccaucgucuccuccgaggucuccggcaagaacgaccacaucuggaacgagccccucgaguucgacaucaacaucugcgaccucccccgcauggcccgccucugcuucgccgucuacgccguccucgacaaggucaagaccaagaaguccaccaagaccaucaaccccuccaaguaccagaccauccgcaaggccggcaagguccacuaccccgucgccugggucaacaccauggucuucgacuucaagggccagcuccgcaccggcgacaucauccuccacuccugguccuccuuccccgacgagcucgaggagaugcucaaccccaugggcaccguccagaccaaccccuacaccgagaacgccaccgcccuccacgucaaguuccccgagaacaagaagcagcccuacuacuacccccccuucgacaagaucaucgagaaggccgccgagaucgccuccuccgacuccgccaacgucuccucccgcggcggcaagaaguuccuccccguccucaaggagauccucgaccgcgacccccucucccagcucugcgagaacgagauggaccucaucuggacccuccgccaggacugccgcgagaucuucccccagucccuccccaagcuccuccucuccaucaaguggaacaagcucgaggacgucgcccagcuccaggcccuccuccagaucuggcccaagcuccccccccgcgaggcccucgagcuccucgacuucaacuaccccgaccaguacguccgcgaguacgccgucggcugccuccgccagauguccgacgaggagcucucccaguaccuccuccagcucguccagguccucaaguacgagcccuuccucgacugcgcccucucccgcuuccuccucgagcgcgcccucggcaaccgccgcaucggccaguuccucuucuggcaccuccgcuccgagguccacauccccgccgucuccguccaguucggcgucauccucgaggccuacugccgcggcuccgucggccacaugaagguccucuccaagcaggucgaggcccucaacaagcucaagacccucaacucccucaucaagcucaacgccgucaagcucaaccgcgccaagggcaaggaggccaugcacaccugccucaagcaguccgccuaccgcgaggcccucuccgaccuccaguccccccucaaccccugcgucauccucuccgagcucuacgucgagaagugcaaguacauggacuccaagaugaagccccucuggcucgucuacaacaacaaggucuucggcgaggacuccgucggcgucaucuucaagaacggcgacgaccuccgccaggacaugcucacccuccagaugcuccgccucauggaccuccucuggaaggaggccggccucgaccuccgcaugcuccccuacggcugccucgccaccggcgaccgcuccggccucaucgaggucgucuccaccuccgagaccaucgccgacauccagcucaacuccuccaacgucgccgccgccgccgccuucaacaaggacgcccuccucaacuggcucaaggaguacaacuccggcgacgaccucgaccgcgccaucgaggaguucacccucuccugcgccggcuacugcgucgccuccuacguccucggcaucggcgaccgccacuccgacaacaucauggucaagaagaccggccagcucuuccacaucgacuucggccacauccucggcaacuucaaguccaaguucggcaucaagcgcgagcgcguccccuucauccucaccuacgacuucauccacgucauccagcagggcaagaccggcaacaccgagaaguucggccgcuuccgccagugcugcgaggacgccuaccucauccuccgccgccacggcaaccucuucaucacccucuucgcccucaugcucaccgccggccuccccgagcucaccuccgucaaggacauccaguaccucaaggacucccucgcccucggcaaguccgaggaggaggcccucaagcaguucaagcagaaguucgacgaggcccuccgcgaguccuggaccaccaaggucaacuggauggcccacaccguccgcaaggacuaccgcuccuga

SEQ ID NO: 9218 - RNA, 3213 nt, Artificial Sequence
  derived and/or modified sequence opt3 from PI3K__Homo_sapiens__AAB29081
augugcuucagcuuuaucaugcccccugccauggcugacauucuggauauaugggcaguggacucccagaucgccucugauggcucaauuccagucgacuuccuccuuccgaccgggaucuacauucaacuggagguucccagagaagcgacaaucaguuauauaaagcagauguuguggaaacaggugcacaacuacccuauguuuaauuuacugauggauaucgacagcuauauguucgcuuguguaaaccagacugccguguacgaggaacuagaggaugaaacgaggcggcucugcgacguccgcccauuucugcccgugcuuaagcugguuacccgauccugugauccuggagagaaauuggacucuaagauuggugugcucaucggcaaagggcugcaugaguucgauucgcugaaggacccagaagucaaugaguuucguagaaagaugaggaaauucucagaagagaagauucucagcuuagugggacugaguuggauggauuggcuuaaacaaacauaucccccugagcacgaaccauccaucccggagaacuuggaagacaagcuguacggcgguaaacuaauaguagcaguucauuuugagaauugccaggacguguucucuuuucaggucagccccaacaugaauccuauuaaggugaacgaacucgccauccagaagcggcugacuauucacgggaaagaggaugagguguccccauaugacuacguccuucaaguuucaggacgcguggaauacguauucggcgaucauccccugauccaguuucaguauaucagaaauugugugaugaacagggcuuugccucacuucauucucgucgagugcuguaagaucaaaaagauguacgaacaggagaugauagcaauugaagccgcuaucaaucggaacaguagcaaucugccauuaccccugccgccuaaaaagacccgcauaauuucucacgugugggagaacaauaaccccuuccaaaucguucucgugaaaggcaacaaguugaauacagaggaaaccgucaaggugcauguacgagccgggcuguuucacggaacugaguugcuaugcaaaacaaucguuuccucagaagugagcgguaagaacgaccauauuuggaaugagccacuggaguucgauaucaacauuugugaccucccuagaauggcgaggcugugcuuugcagucuaugccgugcuugauaaagucaagaccaaaaagaguacgaagacuauaaaucccucuaaauaccagaccauccggaaggcuggcaaagugcacuauccaguugccugggugaacacaaugguauucgacuuuaaggggcagcugcguacuggagauauuaucuugcacuccuggagcucguuccccgacgaacucgaggaaaugcugaauccuaugggcaccguccaaacaaacccauacaccgagaaugcaacggcuuuacaugugaaauuuccggaaaacaagaagcagcccuauuacuacccuccauucgauaaaaucauugagaaggccgcggagauagccucuuccgacucagcaaauguuaguagccgcggugggaaaaaguuucugcccgugcuaaaagaaauccucgacagagauccucugucccagcuuugugagaacgaaauggacuugauuuggacucugaggcaggauugccgggagaucuucccacaaucucuccccaagcugcuucugagcauuaaguggaauaaauuggaagacgucgcucagcuccaggcccuguuacagaucuggccgaagcugccuccacgagaggcucuagagcuccuggauuuuaacuaucccgaccaauacgugcgcgaauaugccguaggaugccuuagacagaugucagaugaggaauugagucaguaccugcuccagcuggugcaaguuuuaaaauaugagccuuuccuggacugugcacuuuccagguuuuugcucgaacgggcccugggcaaucgcagaauaggccaguuccuauucuggcaccugaggagcgagguccauauccccgcugugucugugcaguuuggggucauucucgaggcguacugccguggaucaguuggucacaugaaggugcugaguaaacagguggaagcacuuaacaaguugaaaacacugaacagcuuaaucaagcucaaugccguaaagcugaaccgggcuaaaggcaaggaggccaugcauaccugucuuaaacaauccgcauaucgagaagcccugucugauuugcagucgccacucaauccuugcgucauucugagcgagcuauacguggaaaaguguaaauacauggacuccaagaugaagccccuguggcucguuuauaacaauaaaguguucggggaggauucagucggagugaucuuuaagaacggcgacgaucugagacaggacaugcuuacuuugcaaaugcugagguuaauggaccuccuguggaaagaggcuggucuugaucugcgcaugcuaccauacgggugccucgccacaggcgaccggaguggacugauagaaguugugucuaccagcgagacgauugcagauauccagcuuaauuccucaaacguagcggcugccgcagccuucaauaaggacgcucuguuaaacuggcucaaagaauauaauagcggcgaugaccuggauagagccauugaggaguuuacccuuucuugugcaggguacugcgucgcuuccuaugugcugggaaucggugacaggcacagugauaacauaauggugaagaagacaggccaguuguuccacaucgacuuugggcauauucucggaaauuucaaaagcaaguuuggcaucaaacgcgaacgagucccguucauucugacuuacgauuuuauccacguuauacagcaagguaagaccgggaacacagagaaauucggccgguuucgucaguguugcgaagacgccuaucuaauucugagaaggcauggaaaucuuuucaucacucucuucgcgcugauguugaccgccggccugccugaguuaacaucugugaaggauauccaguaccucaaggacucccuggcucuugggaaaucagaagaggaggcacugaagcaguuuaaacaaaaguucgacgaagccuugcgcgagaguuggaccacuaaaguaaacuggauggcucacacggugcggaaggauuacagaagcuga

SEQ ID NO: 9219 - RNA, 3213 nt, Artificial Sequence
  derived and/or modified sequence opt4 from PI3K__Homo_sapiens__AAB29081
augugcuucagcuucaucaugccccccgccauggccgacauccuggacaucugggccguggacagccagaucgccagcgacggcagcauccccguggacuuccugcugcccaccggcaucuacauccagcuggaggugcccagagaggccaccaucagcuacaucaagcagaugcuguggaagcaggugcacaacuaccccauguucaaccugcugauggacaucgacagcuacauguucgccugcgugaaccagaccgccguguacgaggagcuggaggacgagaccagaagacugugcgacgugagacccuuccugcccgugcugaagcuggugaccagaagcugcgaccccggcgagaagcuggacagcaagaucggcgugcugaucggcaagggccugcacgaguucgacagccugaaggaccccgaggugaacgaguucagaagaaagaugagaaaguucagcgaggagaagauccugagccuggugggccugagcuggauggacuggcugaagcagaccuacccccccgagcacgagcccagcauccccgagaaccuggaggacaagcuguacggcggcaagcugaucguggccgugcacuucgagaacugccaggacguguucagcuuccaggugagccccaacaugaaccccaucaaggugaacgagcuggccauccagaagagacugaccauccacggcaaggaggacgaggugagccccuacgacuacgugcugcaggugagcggcagaguggaguacguguucggcgaccacccccugauccaguuccaguacaucagaaacugcgugaugaacagagcccugccccacuucauccugguggagugcugcaagaucaagaagauguacgagcaggagaugaucgccaucgaggccgccaucaacagaaacagcagcaaccugccccugccccugccccccaagaagaccagaaucaucagccacgugugggagaacaacaaccccuuccagaucgugcuggugaagggcaacaagcugaacaccgaggagaccgugaaggugcacgugagagccggccuguuccacggcaccgagcugcugugcaagaccaucgugagcagcgaggugagcggcaagaacgaccacaucuggaacgagccccuggaguucgacaucaacaucugcgaccugcccagaauggccagacugugcuucgccguguacgccgugcuggacaaggugaagaccaagaagagcaccaagaccaucaaccccagcaaguaccagaccaucagaaaggccggcaaggugcacuaccccguggccugggugaacaccaugguguucgacuucaagggccagcugagaaccggcgacaucauccugcacagcuggagcagcuuccccgacgagcuggaggagaugcugaaccccaugggcaccgugcagaccaaccccuacaccgagaacgccaccgcccugcacgugaaguuccccgagaacaagaagcagcccuacuacuacccccccuucgacaagaucaucgagaaggccgccgagaucgccagcagcgacagcgccaacgugagcagcagaggcggcaagaaguuccugcccgugcugaaggagauccuggacagagacccccugagccagcugugcgagaacgagauggaccugaucuggacccugagacaggacugcagagagaucuucccccagagccugcccaagcugcugcugagcaucaaguggaacaagcuggaggacguggcccagcugcaggcccugcugcagaucuggcccaagcugccccccagagaggcccuggagcugcuggacuucaacuaccccgaccaguacgugagagaguacgccgugggcugccugagacagaugagcgacgaggagcugagccaguaccugcugcagcuggugcaggugcugaaguacgagcccuuccuggacugcgcccugagcagauuccugcuggagagagcccugggcaacagaagaaucggccaguuccuguucuggcaccugagaagcgaggugcacauccccgccgugagcgugcaguucggcgugauccuggaggccuacugcagaggcagcgugggccacaugaaggugcugagcaagcagguggaggcccugaacaagcugaagacccugaacagccugaucaagcugaacgccgugaagcugaacagagccaagggcaaggaggccaugcacaccugccugaagcagagcgccuacagagaggcccugagcgaccugcagagcccccugaaccccugcgugauccugagcgagcuguacguggagaagugcaaguacauggacagcaagaugaagccccuguggcugguguacaacaacaagguguucggcgaggacagcgugggcgugaucuucaagaacggcgacgaccugagacaggacaugcugacccugcagaugcugagacugauggaccugcuguggaaggaggccggccuggaccugagaaugcugcccuacggcugccuggccaccggcgacagaagcggccugaucgagguggugagcaccagcgagaccaucgccgacauccagcugaacagcagcaacguggccgccgccgccgccuucaacaaggacgcccugcugaacuggcugaaggaguacaacagcggcgacgaccuggacagagccaucgaggaguucacccugagcugcgccggcuacugcguggccagcuacgugcugggcaucggcgacagacacagcgacaacaucauggugaagaagaccggccagcuguuccacaucgacuucggccacauccugggcaacuucaagagcaaguucggcaucaagagagagagagugcccuucauccugaccuacgacuucauccacgugauccagcagggcaagaccggcaacaccgagaaguucggcagauucagacagugcugcgaggacgccuaccugauccugagaagacacggcaaccuguucaucacccuguucgcccugaugcugaccgccggccugcccgagcugaccagcgugaaggacauccaguaccugaaggacagccuggcccugggcaagagcgaggaggaggcccugaagcaguucaagcagaaguucgacgaggcccugagagagagcuggaccaccaaggugaacuggauggcccacaccgugagaaaggacuacagaagcuga

SEQ ID NO: 9220 - RNA, 3213 nt, Artificial Sequence
  derived and/or modified sequence opt5 from PI3K__Homo_sapiens__AAB29081
augugcuucagcuuuaucaugcccccugccauggcugacauucuggauaucugggccguggacucccagauugcgucugauggcagcaucccggucgacuuccuccugcccaccgggauuuacauccaacuugagguuccuagagaagcuacaaucuccuauauuaagcagaugcuguggaaacaggugcacaacuaccccauguuuaaucuccugauggauaucgacucuuauauguucgccugugugaaccagacggccgucuacgaggaacuugaggaugaaacccggcgccugugcgacgugagaccuuuucuccccguucugaagcuggugacacggagcugugauccuggagagaaacucgacuccaagauuggcguccugaucgggaaaggacuucaugaguucgauucucugaaggacccggaagugaaugaguuucgcagaaagaugcggaaauucagcgaagagaagauucucucccugguuggccuuagcuggauggauuggcugaaacaaaccuaucccccugagcacgaacccucuaucccugagaaccucgaagacaagcuguacgggggaaaacugauuguggcuguccauuuugagaauugccaggacguguucuccuuucaggugagccccaacaugaauccgaucaaggucaacgaacucgccauccagaagcgccugacaauucacggcaaagaggaugagguuucuccuuaugacuacgugcuucaaguguccggcagagucgaauacguguucggggaucauccccugauccaguuucaguauauucggaauuguguuaugaaccgcgcucucccucacuucauccugguggagugcuguaagauuaaaaagauguacgaacaggagaugaucgccaucgaagcggccauuaauagaaacagcucuaaucuuccccugccccucccuccgaaaaagacccggaucauuucccacgucugggagaacaauaaccccuuccaaaucgugcugguuaaaggaaacaagcugaauacagaggaaaccgugaagguccaugugcgcgcuggccucuuucacgggacggagcugcuuugcaaaaccauugucagcuccgaagugucuggaaagaacgaccauaucuggaaugagccucuggaguucgauaucaacauuugugaccuccccagaauggcccggcugugcuuugcuguuuaugccgugcuugauaaagucaagaccaaaaagagcacaaagacaaucaauccuuccaaauaccagaccauucgcaaggcgggcaaagugcacuaucccguugccugggugaacacgauggucuucgacuuuaaggggcagcugagaacaggagauaucauucuccacagcuggucuuccuucccggacgaacuggaggaaaugcugaauccuaugggcaccgugcaaacaaaccccuacaccgagaaugcuaccgcccuccaugugaaauuuccugaaaacaagaagcagcccuauuacuacccucccuucgauaaaaucauugagaaggcugccgagaucgccagcucugacagcgcuaauguuuccucucggggcgggaaaaaguuucugccgguccuuaaagaaauccuggacagagauccucucagccagcugugugagaacgaaauggaccugauuuggacacuucgccaggauugccgggagaucuucccccaaucccuccccaagcugcugcucagcauuaaguggaauaaacuggaagacguggcgcagcuucaggcccugcuccagaucuggccuaagcugccgcccagagaggcucuggagcuucucgauuuuaacuauccugaccaauacgugcgcgaauaugccgucggaugccugcggcagaugucugaugaggaacugucccaguaccuccugcagcuugugcaaguucugaaauaugagcccuuccucgacugugcccugagcagauuucugcuugaacgcgcucucggcaaucggagaauugggcaguuccuguucuggcaucugcgcucugaggugcacaucccugccgucuccgugcaguuuggaguuauccucgaggcguacugccggggcagcguggggcacaugaagguccuguccaaacagguggaagcucuuaacaagcugaaaacgcucaacucucugauuaagcugaaugccguuaagcugaacagagccaaaggaaaggaggcuaugcauaccugucucaaacaaagcgccuaucgcgaagcucuguccgaucugcagucuccccucaauccuugcgugauccugagcgagcuuuacgucgaaaaguguaaauacauggacuccaagaugaagccccuguggcucguguauaacaauaaaguguucggcgaggauagcgucggcguuauuuuuaagaacggggacgaucugcggcaggacaugcugacacuucaaaugcugagacucauggaccugcucuggaaagaggccggacuggaucuucggaugcugccguacggcugccucgcgaccggggaccgcucuggacugaucgaagugguguccacaagcgagaccauugccgauauccagcuuaauucuuccaacgucgcugccgcugccgcguucaauaaggacgcccuucugaacuggcucaaagaauauaauagcggcgaugaccuggauagagcuaucgaggaguuuacgcucucuugugccggguacugcguggcuagcuauguucugggcauuggagaccggcacuccgauaacaucauggugaagaagacaggccagcuuuuccacauugacuuugggcauauccugggaaauuucaaaagcaaguuuggcauuaaaagagaacgcgucccuuucauccucaccuacgauuuuauccacgugauucagcaagggaagaccggaaacacagagaaauucggccgguuuagacaguguugcgaagacgccuaucugauccugcgcagacaugggaaucuuuucauuacccuguucgcccucaugcugacagcuggccuccccgagcugacgucuguuaaggauauccaguaccuuaaggacucccuggcgcugggaaaaagcgaagaggaggcccucaagcaguuuaaacaaaaguucgacgaagcucugcgggaguccuggaccacaaaagugaacuggauggcccacaccguccgcaaggauuacagaucuuga

SEQ ID NO: 9221 - protein, 1102 aa, Artificial Sequence
  PI3K__Homo_sapiens__P48736
MELENYKQPVVLREDNCRRRRRMKPRSAAASLSSMELIPIEFVLPTSQRKCKSPETALLHVAGHGNVEQMKAQVWLRALETSVAADFYHRLGPHHFLLLYQKKGQWYEIYDKYQVVQTLDCLRYWKATHRSPGQIHLVQRHPPSEESQAFQRQLTALIGYDVTDVSNVHDDELEFTRRGLVTPRMAEVASRDPKLYAMHPWVTSKPLPEYLWKKIANNCIFIVIHRSTTSQTIKVSPDDTPGAILQSFFTKMAKKKSLMDIPESQSEQDFVLRVCGRDEYLVGETPIKNFQWVRHCLKNGEEIHVVLDTPPDPALDEVRKEEWPLVDDCTGVTGYHEQLTIHGKDHESVFTVSLWDCDRKFRVKIRGIDIPVLPRNTDLTVFVEANIQHGQQVLCQRRTSPKPFTEEVLWNVWLEFSIKIKDLPKGALLNLQIYCGKAPALSSKASAESPSSESKGKVQLLYYVNLLLIDHRFLLRRGEYVLHMWQISGKGEDQGSFNADKLTSATNPDKENSMSISILLDNYCHPIALPKHQPTPDPEGDRVRAEMPNQLRKQLEAIIATDPLNPLTAEDKELLWHFRYESLKHPKAYPKLFSSVKWGQQEIVAKTYQLLARREVWDQSALDVGLTMQLLDCNFSDENVRAIAVQKLESLEDDDVLHYLLQLVQAVKFEPYHDSALARFLLKRGLRNKRIGHFLFWFLRSEIAQSRHYQQRFAVILEAYLRGCGTAMLHDFTQQVQVIEMLQKVTLDIKSLSAEKYDVSSQVISQLKQKLENLQNSQLPESFRVPYDPGLKAGALAIEKCKVMASKKKPLWLEFKCADPTALSNETIGIIFKHGDDLRQDMLILQILRIMESIWETESLDLCLLPYGCISTGDKIGMIEIVKDATTIAKIQQSTVGNTGAFKDEVLNHWLKEKSPTEEKFQAAVERFVYSCAGYCVATFVLGIGDRHNDNIMITETGNLFHIDFGHILGNYKSFLGINKERVPFVLTPDFLFVMGTSGKKTSPHFQKFQDICVKAYLALRHHTNLLIILFSMMLMTGMPQLTSKEDIEYIRDALTVGKNEEDAKKYFLDQIEVCRDKGWTVQFNWFLHLVLGIKQGEKHSA

SEQ ID NO: 9222 - RNA, 3309 nt, Artificial Sequence
  PI3K__Homo_sapiens__AAH35683
auggagcuggagaacuauaaacagcccguggugcugagagaggacaacugccgaaggcgccggaggaugaagccgcgcagugcugcggccagccuguccuccauggagcucauccccaucgaguucgugcugcccaccagccagcgcaaaugcaagagccccgaaacggcgcugcugcacguggccggccacggcaacguggagcagaugaaggcccagguguggcugcgagcgcuggagaccagcguggcggcggacuucuaccaccggcugggaccgcaucacuuccuccugcucuaucagaagaaggggcagugguacgagaucuacgacaaguaccagguggugcagacucuggacugccugcgcuacuggaaggccacgcaccggagcccgggccagauccaccuggugcagcggcacccgcccuccgaggagucccaagccuuccagcggcagcucacggcgcugauuggcuaugacgucacugacgucagcaacgugcacgacgaugagcuggaguucacgcgccguggcuuggugaccccgcgcauggcggagguggccagccgcgaccccaagcucuacgccaugcacccgugggugacguccaagccccucccggaguaccuguggaagaagauugccaacaacugcaucuucaucgucauucaccgcagcaccaccagccagaccauuaaggucucacccgacgacacccccggcgccauccugcagagcuucuucaccaagauggccaagaagaaaucucugauggauauucccgaaagccaaagcgaacaggauuuugugcugcgcgucuguggccgggaugaguaccuggugggcgaaacgcccaucaaaaacuuccagugggugaggcacugccucaagaacggagaagagauucacgugguacuggacacgccuccagacccggcccuagacgaggugaggaaggaagaguggccgcugguggacgacugcacgggagucaccggcuaccaugagcagcuuaccauccacggcaaggaccacgagaguguguucaccgugucccugugggacugcgaccgcaaguucagggucaagaucagaggcauugauauccccguccugccucggaacaccgaccucacaguuuuuguagaggcaaacauccagcaugggcaacaaguccuuugccaaaggagaaccagccccaaacccuucacagaggaggugcuguggaauguguggcuugaguucaguaucaaaaucaaagacuugcccaaaggggcucuacugaaccuccagaucuacugcgguaaagcuccagcacuguccagcaaggccucugcagagucccccaguucugaguccaagggcaaaguucagcuucucuauuaugugaaccugcugcugauagaccaccguuuccuccugcgccguggagaauacguccuccacauguggcagauaucugggaagggagaagaccaaggaagcuucaaugcugacaaacucacgucugcaacuaacccagacaaggagaacucaauguccaucuccauucuucuggacaauuacugccacccgauagcccugccuaagcaucagcccaccccugacccggaaggggaccggguucgagcagaaaugcccaaccagcuucgcaagcaauuggaggcgaucauagccacugauccacuuaacccucucacagcagaggacaaagaauugcucuggcauuuuagauacgaaagccuuaagcacccaaaagcauauccuaagcuauuuaguucagugaaauggggacagcaagaaauuguggccaaaacauaccaauuguuggccagaagggaagucugggaucaaagugcuuuggauguuggguuaacaaugcagcuccuggacugcaacuucucagaugaaaauguaagagccauugcaguucagaaacuggagagcuuggaggacgaugauguucugcauuaccuucuacaauugguccaggcugugaaauuugaaccauaccaugauagugcccuugccagauuucugcugaagcgugguuuaagaaacaaaagaauuggucacuuuuuguuuugguucuugagaagugagauagcccaguccagacacuaucagcagagguucgcugugauucuggaagccuaucugaggggcuguggcacagccaugcugcacgacuuuacccaacaaguccaaguaaucgagauguuacaaaaagucacccuugauauuaaaucgcucucugcugaaaaguaugacgucaguucccaaguuauuucacaacuuaaacaaaagcuugaaaaccugcagaauucucaacuccccgaaagcuuuagaguuccauaugauccuggacugaaagcaggagcgcuggcaauugaaaaauguaaaguaauggccuccaagaaaaaaccacuauggcuugaguuuaaaugugccgauccuacagcccuaucaaaugaaacaauuggaauuaucuuuaaacauggugaugaucugcgccaagacaugcuuauuuuacagauucuacgaaucauggagucuauuugggagacugaaucuuuggaucuaugccuccugccauaugguugcauuucaacuggugacaaaauaggaaugaucgagauugugaaagacgccacgacaauugccaaaauucagcaaagcacagugggcaacacgggagcauuuaaagaugaaguccugaaucacuggcucaaagaaaaauccccuacugaagaaaaguuucaggcagcaguggagagauuuguuuauuccugugcaggcuacuguguggcaaccuuuguucuuggaauaggcgacagacacaaugacaauauuaugaucaccgagacaggaaaccuauuucauauugacuucgggcacauucuugggaauuacaaaaguuuccugggcauuaauaaagagagagugccauuugugcuaaccccugacuuccucuuugugaugggaacuucuggaaagaagacaagcccacacuuccagaaauuucaggacaucuguguuaaggcuuaucuagcccuucgucaucacacaaaccuacugaucauccuguucuccaugaugcugaugacaggaaugccccaguuaacaagcaaagaagacauugaauauauccgggaugcccucacaguggggaaaaaugaggaggaugcuaaaaaguauuuucuugaucagaucgaaguuugcagagacaaaggauggacugugcaguuuaauugguuucuacaucuuguucuuggcaucaaacaaggagagaaacauucagccuaa

SEQ ID NO: 9223 - RNA, 3309 nt, Artificial Sequence
  derived and/or modified sequence opt1 from PI3K__Homo_sapiens__AAH35683
auggagcuggagaacuacaagcagcccgugguccuccgcgaggacaacugccggcgccggcgccggaugaagccgcgcagcgccgccgcgucccugagcuccauggagcugauccccaucgaguucgugcuccccaccagccagcggaagugcaagucccccgagaccgcccugcugcacguggccggccacgggaacgucgagcagaugaaggcccagguguggcuccgcgcccuggagacgagcguggcggccgacuucuaccaccggcugggcccgcaccacuuccuccugcuguaccagaagaaggggcagugguacgagaucuacgacaaguaccaggucgugcagacccucgacugccugcgcuacuggaaggccacccaccggucccccggccagauccaccuggugcagcgccacccgcccagcgaggagucccaggccuuccagcggcagcucaccgcgcugaucggguacgacgucacggacgugagcaacgugcacgacgacgagcuggaguucacccgccggggccucgucacgccccgcauggccgagguggccucccgggaccccaagcuguacgccaugcaccccugggugaccagcaagccccugccggaguaccucuggaagaagaucgccaacaacugcaucuucaucgucauccaccgcuccaccaccagccagaccaucaaggugucccccgacgacacccccggcgcgauccugcagagcuucuucacgaagauggccaagaagaagucccugauggacauccccgagagccaguccgagcaggacuucgugcuccgggucugcgggcgcgacgaguaccuggugggcgagaccccgaucaagaacuuccagugggugcggcacugccugaagaacggggaggagauccacgucgugcucgacaccccgcccgaccccgcccuggacgaggugcgcaaggaggaguggccccuggucgacgacugcaccggcgugacgggguaccacgagcagcucaccauccacggcaaggaccacgagagcgucuucaccgugagccugugggacugcgaccgcaaguuccgggugaagauccgcggcaucgacauccccguccugccccggaacaccgaccucacgguguucguggaggccaacauccagcacgggcagcagguccugugccagcgccggaccucccccaagccguucaccgaggaggugcuguggaacguguggcucgaguucagcaucaagaucaaggaccugcccaagggcgcccugcucaaccugcagaucuacugcgggaaggcgcccgcccuguccagcaaggccuccgccgagagccccuccagcgaguccaagggcaagguccagcuccuguacuacgugaaccugcuccugaucgaccaccgcuuccugcuccggcgcggcgaguacgugcugcacauguggcagaucagcgggaagggcgaggaccagggguccuucaacgccgacaagcugaccagcgcgacgaacccggacaaggagaacuccaugagcaucuccauccugcucgacaacuacugccaccccaucgcccugcccaagcaccagccgacccccgaccccgagggcgaccggguccgcgccgagaugcccaaccagcugcggaagcagcucgaggccaucaucgccaccgacccgcugaacccccugaccgcggaggacaaggagcuccuguggcacuuccgcuacgagagccugaagcaccccaaggccuaccccaagcuguucuccagcgugaagugggggcagcaggagaucguggccaagacguaccagcuccuggcccggcgcgaggucugggaccaguccgcgcucgacgugggccugaccaugcagcugcucgacugcaacuucagcgacgagaacgugcgggccaucgccguccagaagcuggagagccuggaggacgacgacgugcuccacuaccugcugcagcucgugcaggccgucaaguucgagccguaccacgacuccgcccuggcgcgcuuccugcucaagcggggccugcgcaacaagcggaucgggcacuuccuguucugguuccuccgcagcgagaucgcccagucccgccacuaccagcagcgguucgccgugauccuggaggccuaccugcgcggcugcgggaccgccaugcuccacgacuucacccagcagguccaggugaucgagaugcugcagaaggugacgcuggacaucaagagccucuccgcggagaaguacgacgugagcucccaggucaucagccagcugaagcagaagcuggagaaccuccagaacucccagcugcccgagagcuuccgggugcccuacgaccccggccugaaggccggggcccucgccaucgagaagugcaaggugauggccuccaagaagaagccgcuguggcuggaguucaagugcgcggaccccaccgcccucagcaacgagaccaucggcaucaucuucaagcacggcgacgaccugcgccaggacaugcugauccuccagauccugcggaucauggaguccaucugggagaccgagagccuggaccucugccugcugcccuacgggugcaucuccacgggcgacaagaucgggaugaucgagaucgucaaggacgccaccaccaucgccaagauccagcagagcaccgugggcaacaccggggcguucaaggacgaggugcucaaccacuggcugaaggagaagucccccacggaggagaaguuccaggccgccgucgagcgcuucguguacagcugcgccggcuacugcguggccaccuucguccugggcaucggggaccggcacaacgacaacaucaugaucaccgagaccggcaaccucuuccacaucgacuucgggcacauccugggcaacuacaagagcuuccugggcaucaacaaggagcgcgugccguucgugcucacgcccgacuuccuguucgucauggggaccuccggcaagaagaccagcccccacuuccagaaguuccaggacaucugcgugaaggcguaccuggcccuccggcaccacaccaaccugcugaucauccucuucuccaugaugcugaugacggggaugccccagcugaccagcaaggaggacaucgaguacauccgcgacgcccucaccgugggcaagaacgaggaggacgccaagaaguacuuccuggaccagaucgaggucugccgggacaagggguggaccgugcaguucaacugguuccugcaccucgugcugggcaucaagcagggcgagaagcacuccgccuga

SEQ ID NO: 9224 - RNA, 3309 nt, Artificial Sequence
  derived and/or modified sequence opt2 from PI3K__Homo_sapiens__AAH35683
auggagcucgagaacuacaagcagcccgucguccuccgcgaggacaacugccgccgccgccgccgcaugaagccccgcuccgccgccgccucccucuccuccauggagcucauccccaucgaguucguccuccccaccucccagcgcaagugcaagucccccgagaccgcccuccuccacgucgccggccacggcaacgucgagcagaugaaggcccaggucuggcuccgcgcccucgagaccuccgucgccgccgacuucuaccaccgccucggcccccaccacuuccuccuccucuaccagaagaagggccagugguacgagaucuacgacaaguaccaggucguccagacccucgacugccuccgcuacuggaaggccacccaccgcucccccggccagauccaccucguccagcgccacccccccuccgaggagucccaggccuuccagcgccagcucaccgcccucaucggcuacgacgucaccgacgucuccaacguccacgacgacgagcucgaguucacccgccgcggccucgucaccccccgcauggccgaggucgccucccgcgaccccaagcucuacgccaugcaccccugggucaccuccaagccccuccccgaguaccucuggaagaagaucgccaacaacugcaucuucaucgucauccaccgcuccaccaccucccagaccaucaaggucucccccgacgacacccccggcgccauccuccaguccuucuucaccaagauggccaagaagaagucccucauggacauccccgagucccaguccgagcaggacuucguccuccgcgucugcggccgcgacgaguaccucgucggcgagacccccaucaagaacuuccaguggguccgccacugccucaagaacggcgaggagauccacgucguccucgacaccccccccgaccccgcccucgacgagguccgcaaggaggaguggccccucgucgacgacugcaccggcgucaccggcuaccacgagcagcucaccauccacggcaaggaccacgaguccgucuucaccgucucccucugggacugcgaccgcaaguuccgcgucaagauccgcggcaucgacauccccguccucccccgcaacaccgaccucaccgucuucgucgaggccaacauccagcacggccagcagguccucugccagcgccgcaccucccccaagcccuucaccgaggagguccucuggaacgucuggcucgaguucuccaucaagaucaaggaccuccccaagggcgcccuccucaaccuccagaucuacugcggcaaggcccccgcccucuccuccaaggccuccgccgagucccccuccuccgaguccaagggcaagguccagcuccucuacuacgucaaccuccuccucaucgaccaccgcuuccuccuccgccgcggcgaguacguccuccacauguggcagaucuccggcaagggcgaggaccagggcuccuucaacgccgacaagcucaccuccgccaccaaccccgacaaggagaacuccauguccaucuccauccuccucgacaacuacugccaccccaucgcccuccccaagcaccagcccacccccgaccccgagggcgaccgcguccgcgccgagaugcccaaccagcuccgcaagcagcucgaggccaucaucgccaccgacccccucaacccccucaccgccgaggacaaggagcuccucuggcacuuccgcuacgagucccucaagcaccccaaggccuaccccaagcucuucuccuccgucaaguggggccagcaggagaucgucgccaagaccuaccagcuccucgcccgccgcgaggucugggaccaguccgcccucgacgucggccucaccaugcagcuccucgacugcaacuucuccgacgagaacguccgcgccaucgccguccagaagcucgagucccucgaggacgacgacguccuccacuaccuccuccagcucguccaggccgucaaguucgagcccuaccacgacuccgcccucgcccgcuuccuccucaagcgcggccuccgcaacaagcgcaucggccacuuccucuucugguuccuccgcuccgagaucgcccagucccgccacuaccagcagcgcuucgccgucauccucgaggccuaccuccgcggcugcggcaccgccaugcuccacgacuucacccagcagguccaggucaucgagaugcuccagaaggucacccucgacaucaagucccucuccgccgagaaguacgacgucuccucccaggucaucucccagcucaagcagaagcucgagaaccuccagaacucccagcuccccgaguccuuccgcguccccuacgaccccggccucaaggccggcgcccucgccaucgagaagugcaaggucauggccuccaagaagaagccccucuggcucgaguucaagugcgccgaccccaccgcccucuccaacgagaccaucggcaucaucuucaagcacggcgacgaccuccgccaggacaugcucauccuccagauccuccgcaucauggaguccaucugggagaccgagucccucgaccucugccuccuccccuacggcugcaucuccaccggcgacaagaucggcaugaucgagaucgucaaggacgccaccaccaucgccaagauccagcaguccaccgucggcaacaccggcgccuucaaggacgagguccucaaccacuggcucaaggagaagucccccaccgaggagaaguuccaggccgccgucgagcgcuucgucuacuccugcgccggcuacugcgucgccaccuucguccucggcaucggcgaccgccacaacgacaacaucaugaucaccgagaccggcaaccucuuccacaucgacuucggccacauccucggcaacuacaaguccuuccucggcaucaacaaggagcgcguccccuucguccucacccccgacuuccucuucgucaugggcaccuccggcaagaagaccuccccccacuuccagaaguuccaggacaucugcgucaaggccuaccucgcccuccgccaccacaccaaccuccucaucauccucuucuccaugaugcucaugaccggcaugccccagcucaccuccaaggaggacaucgaguacauccgcgacgcccucaccgucggcaagaacgaggaggacgccaagaaguacuuccucgaccagaucgaggucugccgcgacaagggcuggaccguccaguucaacugguuccuccaccucguccucggcaucaagcagggcgagaagcacuccgccuga

SEQ ID NO: 9225 - RNA, 3309 nt, Artificial Sequence
  derived and/or modified sequence opt3 from PI3K__Homo_sapiens__AAH35683
auggagcuggaaaacuacaagcagcccgugguccucagagaggacaauugcaggcggcgccgacguaugaaaccuagaagcgccgcugcaucccuuucuucaauggaacugaucccaauugaguucguuuugccgaccagucaaaggaaguguaaaagccccgaaacagccuuacugcacguggcgggccaugggaacguagagcagaugaaggcucagguguggcuacgggcccucgagacuuccgucgcagccgauuuuuaucaccgccugggaccucaucacuuccuucuguuguaccagaaaaagggucaaugguaugaaauauacgacaaguaucaggugguucagacgcucgauugccugagauacuggaaagcuacccauaggucuccaggccagauccaccuggugcaacggcaucccccuucggaggaaucacaggcauuucagcgccagcucacagccuuaauuggguaugacgucacugaugugagcaauguacacgacgaugagcuggaguucacccgaagaggacuuguuacaccaaggauggcugaaguggccagucgggaccccaaguuguacgcgaugcacccuugggucaccuccaaaccacugccggaguaccuauggaagaaaaucgcaaacaauuguauuuuuaucgugauacaucguucuacuacaagccaaaccaucaaggugucccccgaugacacgccuggcgccauucuccagucauucuuuacuaagauggcuaaaaagaaaagucugauggauaucccagaaagccagucugagcaagacuucguccuucgcguuugcgguagagaugaauaucuggugggggagacccccauuaagaacuuucaguggguaaggcacuguuugaaaaauggagaggaaauccacgugguccucgacacaccuccagaccccgcccuggaugaggugcggaaggaagaguggccguuaguugacgauugcacuggcgugaccggcuaccaugaacagcugacaauacacgggaaagaccaugaguccgucuucaccgugucacucugggauugugaccgaaaguuucgcguaaagauuagaggaaucgauauuccuguucuucccaggaacacggaccugacuguguucgucgaggcaaauauccagcacggucaacagguguugugccagcggcgcacaagcccaaaaccuuuuaccgaagagguccuauggaacguguggcuggaguucaguaucaagauuaaagaucuccccaagggcgcucugcuuaaucugcagauauauugugggaaagccccagcguugucuuccaaggccagcgcagaaucgcccucuuccgaaucaaagggaaaaguucaacuccuguacuaugugaacuuacugcuaaucgaccauagauuccuccugaggcguggcgaguacguacuucacauguggcagauuagugguaagggggaggaucagggcagcuuuaaugcugacaaauugacuuccgccacaaacccugacaaggaaaauucuaugagcaucucaauacugcucgauaacuauugccacccaauugcucugccgaaacaucagcccaccccugacccagagggagaucggguccgagccgaaaugcccaaccaacuuagaaagcagcuggaggcaaucaucgccacggacccuuugaauccacucaccgcugaggauaaggaacuguuauggcacuucagguacgagagucugaaacaucccaaggcguacccgaaacuauuuuccagcgugaaguggggccagcaggaaauuguugcaaaaacauaucaacuccuggcccgccgggaggugugggaccagucugcucuugaugucggguugacuaugcagcugcucgacuguaacuucucagaugaaaaugugagagccaucgcaguacaaaagcuggagaguuuagaggacgaugacgugcugcacuaccuuuugcagcucguucaggccgucaaguuugaaccuuaucacgauagcgcucuggccagguuccuacugaaacgcggacuccgaaacaagcggauuggucauuuucuguucugguuucuucguuccgagauagcacagucuagacacuaccaacagagguucgcggugaucuuggaggcuuaucugcgcggcugcgggaccgccauguuacaugacuuuacacaacaggugcaggucauugaaaugcuccagaaaguuacucuggacaucaagucgcuuagcgcagaaaaauacgauguguccucacaggugaucagucagcugaagcaaaaauuggagaaucuccagaacucucagcugccagagagcuuccggguacccuaugacccuggacuaaaggccggcgcucuggccauugaaaagugcaaagucauggcauccaagaaaaagccccucuggcuggaguuuaaaugugcugauccaaccgcccuuucaaaugaaacaauagguaucauuuucaagcacggggacgauuugagacaagacaugcugaucuuacagauucucaggaucauggagagcauaugggaaaccgagucucuggaucuuugccugcuaccuuacggcuguaucuccacuggagacaagauuggcaugaucgagauugugaaagaugcgacgacaaucgccaagauacagcagaguaccguugggaacacuggagcuuucaaagacgaagugcucaaucauuggcugaaggagaaaagccccaccgaagagaaguuucaagcagccgucgagcgauucguguacucuugcgcugguuauuguguugccacauuuguguugggcauuggggaucgccacaacgacaauaucaugauuaccgaaacuggaaaccuguuccacaucgauuuuggccauauauuagguaauuacaaguccuuccucgggaucaacaaagagcggguaccauuuguccugacaccggacuuccuuuuugugaugggcacgucaggaaagaaaaccaguccucacuuccagaaguuucaggacauuugcgugaaagcauaucuggcguugagacaucacacuaaucuccugaucauucuauucagcaugaugcugaugacaggcaugccccagcuuaccucgaaggaagauaucgaguacauaagggacgcccucacagucgggaagaacgaagaggaugcuaaaaaguauuuucuggaccaaauugagguuugucgugauaaaggauggacugugcaguucaacugguucuugcaucugguauuagguaucaagcagggcgaaaaacacuccgccuga

SEQ ID NO: 9226 - RNA, 3309 nt, Artificial Sequence
  derived and/or modified sequence opt4 from PI3K__Homo_sapiens__AAH35683
auggagcuggagaacuacaagcagcccguggugcugagagaggacaacugcagaagaagaagaagaaugaagcccagaagcgccgccgccagccugagcagcauggagcugauccccaucgaguucgugcugcccaccagccagagaaagugcaagagccccgagaccgcccugcugcacguggccggccacggcaacguggagcagaugaaggcccagguguggcugagagcccuggagaccagcguggccgccgacuucuaccacagacugggcccccaccacuuccugcugcuguaccagaagaagggccagugguacgagaucuacgacaaguaccagguggugcagacccuggacugccugagauacuggaaggccacccacagaagccccggccagauccaccuggugcagagacacccccccagcgaggagagccaggccuuccagagacagcugaccgcccugaucggcuacgacgugaccgacgugagcaacgugcacgacgacgagcuggaguucaccagaagaggccuggugacccccagaauggccgagguggccagcagagaccccaagcuguacgccaugcaccccugggugaccagcaagccccugcccgaguaccuguggaagaagaucgccaacaacugcaucuucaucgugauccacagaagcaccaccagccagaccaucaaggugagccccgacgacacccccggcgccauccugcagagcuucuucaccaagauggccaagaagaagagccugauggacauccccgagagccagagcgagcaggacuucgugcugagagugugcggcagagacgaguaccuggugggcgagacccccaucaagaacuuccagugggugagacacugccugaagaacggcgaggagauccacguggugcuggacaccccccccgaccccgcccuggacgaggugagaaaggaggaguggccccugguggacgacugcaccggcgugaccggcuaccacgagcagcugaccauccacggcaaggaccacgagagcguguucaccgugagccugugggacugcgacagaaaguucagagugaagaucagaggcaucgacauccccgugcugcccagaaacaccgaccugaccguguucguggaggccaacauccagcacggccagcaggugcugugccagagaagaaccagccccaagcccuucaccgaggaggugcuguggaacguguggcuggaguucagcaucaagaucaaggaccugcccaagggcgcccugcugaaccugcagaucuacugcggcaaggcccccgcccugagcagcaaggccagcgccgagagccccagcagcgagagcaagggcaaggugcagcugcuguacuacgugaaccugcugcugaucgaccacagauuccugcugagaagaggcgaguacgugcugcacauguggcagaucagcggcaagggcgaggaccagggcagcuucaacgccgacaagcugaccagcgccaccaaccccgacaaggagaacagcaugagcaucagcauccugcuggacaacuacugccaccccaucgcccugcccaagcaccagcccacccccgaccccgagggcgacagagugagagccgagaugcccaaccagcugagaaagcagcuggaggccaucaucgccaccgacccccugaacccccugaccgccgaggacaaggagcugcuguggcacuucagauacgagagccugaagcaccccaaggccuaccccaagcuguucagcagcgugaaguggggccagcaggagaucguggccaagaccuaccagcugcuggccagaagagaggugugggaccagagcgcccuggacgugggccugaccaugcagcugcuggacugcaacuucagcgacgagaacgugagagccaucgccgugcagaagcuggagagccuggaggacgacgacgugcugcacuaccugcugcagcuggugcaggccgugaaguucgagcccuaccacgacagcgcccuggccagauuccugcugaagagaggccugagaaacaagagaaucggccacuuccuguucugguuccugagaagcgagaucgcccagagcagacacuaccagcagagauucgccgugauccuggaggccuaccugagaggcugcggcaccgccaugcugcacgacuucacccagcaggugcaggugaucgagaugcugcagaaggugacccuggacaucaagagccugagcgccgagaaguacgacgugagcagccaggugaucagccagcugaagcagaagcuggagaaccugcagaacagccagcugcccgagagcuucagagugcccuacgaccccggccugaaggccggcgcccuggccaucgagaagugcaaggugauggccagcaagaagaagccccuguggcuggaguucaagugcgccgaccccaccgcccugagcaacgagaccaucggcaucaucuucaagcacggcgacgaccugagacaggacaugcugauccugcagauccugagaaucauggagagcaucugggagaccgagagccuggaccugugccugcugcccuacggcugcaucagcaccggcgacaagaucggcaugaucgagaucgugaaggacgccaccaccaucgccaagauccagcagagcaccgugggcaacaccggcgccuucaaggacgaggugcugaaccacuggcugaaggagaagagccccaccgaggagaaguuccaggccgccguggagagauucguguacagcugcgccggcuacugcguggccaccuucgugcugggcaucggcgacagacacaacgacaacaucaugaucaccgagaccggcaaccuguuccacaucgacuucggccacauccugggcaacuacaagagcuuccugggcaucaacaaggagagagugcccuucgugcugacccccgacuuccuguucgugaugggcaccagcggcaagaagaccagcccccacuuccagaaguuccaggacaucugcgugaaggccuaccuggcccugagacaccacaccaaccugcugaucauccuguucagcaugaugcugaugaccggcaugccccagcugaccagcaaggaggacaucgaguacaucagagacgcccugaccgugggcaagaacgaggaggacgccaagaaguacuuccuggaccagaucgaggugugcagagacaagggcuggaccgugcaguucaacugguuccugcaccuggugcugggcaucaagcagggcgagaagcacagcgccuga

SEQ ID NO: 9227 - RNA, 3309 nt, Artificial Sequence
  derived and/or modified sequence opt5 from PI3K__Homo_sapiens__AAH35683
auggagcuggaaaacuacaagcagcccgugguccucagagaggacaauugccggcgcagacggcgcaugaaaccuagaagcgccgcugccucccugucuagcauggaacuuaucccgauugaguucguucugcccaccucccaacggaaguguaaaucuccugaaacagcgcuccugcacguggcuggccaugggaacguggagcagaugaaggcccaggucuggcuucgcgcccuggagacgagcguggcugccgauuuuuaucacagacucggaccccaucacuuccugcugcucuaccagaaaaagggccaaugguaugaaaucuacgacaaguaucagguugugcagacccuggauugccuucgguacuggaaagcuacacaucgcuccccugggcagauucaccugguccaaagacaucccccuucugaggaaagccaggccuuucagcggcagcucaccgcgcugaucggauaugacgugacagauguuuccaaugugcacgacgaugagcuugaguucacccgcagaggccuggucacaccgcggauggccgaaguggcuagccgcgaccccaagcucuacgccaugcacccuugggugaccucuaaaccccugccugaguaccuguggaagaaaauugcuaacaauuguaucuuuaucgucauucauagauccacgaccagccaaacaaucaagguuucucccgaugacaccccgggggccauucuccaguccuucuuuacaaagauggcgaaaaagaaaagccugauggauaucccugaaucucaguccgagcaagacuucgugcuucgggugugcggaagagaugaauaucuggucggcgagacccccauuaagaacuuucagugggugcgccacugucucaaaaauggcgaggaaauccacguugugcuggacacgccucccgaccccgcccuugaugagguccggaaggaagaguggccucugguggacgauugcacagggguuaccggauaccaugaacagcucacaauucacggcaaagaccaugagagcguguucaccgucucccugugggauugugacagaaaguuucgcgugaagauccgggggaucgauauuccgguccugcccagaaacaccgaccucacaguguucguugaggcuaauauccagcacggacaacaggugcugugccagcgccggacgucuccuaaacccuuuaccgaagagguccuuuggaacguguggcuggaguucagcauuaagaucaaagaucucccuaagggcgcccugcuuaaucugcagauuuauugugggaaagcucccgcccucuccagcaaggccucugcugaauccccgagcucugaaagcaagggaaaaguucaacugcuguacuaugugaaccuccugcuuaucgaccauagauuccugcuccgccggggcgaguacguccugcacauguggcagaucuccggcaagggggaggaucagggaucuuuuaaugcggacaaacugacaagcgccaccaacccugacaaggaaaauuccaugagcauuucuauccuucucgauaacuauugccaccccauugcucugccuaaacaucagcccacaccugaccccgagggcgauagagugcgcgccgaaaugccgaaccaacugcggaagcagcucgaggccaucauugcuaccgacccucugaauccccuuacggccgaggauaaggaacugcucuggcacuucagauacgagucccugaaacaucccaaggcguacccuaaacuguuuagcucugugaagugggggcagcaggaaaucguugcuaaaacauaucaacuucucgcccggcgcgaggucugggaccaguccgcccuggaugugggacugaccaugcagcuccuggacuguaacuucagcgaugaaaaugugagagcuaucgccguccaaaaacuugagucccuggaggacgaugacgugcuccacuaccugcugcagcuuguucaggcugugaaguuugaaccguaucacgauucugcccucgcgcgguuccugcugaaaagaggccuccgcaacaagcggauugggcauuuucuguucugguuucuuagaagcgagaucgcccagucccgccacuaccaacagagauucgcugucauucuggaagccuaucuccggggaugcggcaccgcuaugcugcaugacuuuacacaacaggugcagguuaucgagaugcugcagaaagugacccuugacauuaagucucucagcgccgaaaaauacgaugucuccagccaggugaucucucagcugaagcaaaaacuggagaaucuccagaacucccagcugcccgagagcuuccgcguuccuuaugaccccggccuuaaggcgggggcccuggcuauugaaaagugcaaagugauggccucuaagaaaaagccucucuggcuggaguuuaaaugugcugaucccacagcccuguccaaugaaacgaucggaaucauuuucaagcacggcgacgaucuuagacaagacaugcugauccuccagauucugcggaucauggagagcauuugggaaaccgagucucucgaucugugccuucugccuuacggguguaucagcacaggagacaagaucggcaugauugagaucgucaaagaugccaccacaauugcuaagauccagcaguccaccguggggaacacgggcgcguucaaagacgaagugcucaaucauuggcugaaggagaaaagccccaccgaagagaaguuucaagccgcugucgagcgcuucguuuacucuugcgccggauauuguguggccacauuugugcugggcauuggggauagacacaacgacaauaucaugaucaccgaaacaggaaaccuuuuccacauugauuuuggccauauccuggggaauuacaaguccuuccucggaauuaacaaagagcgggucccguuugugcugaccccugacuuccucuuuguuaugggcacgagcgggaagaaaacaucuccccacuuccagaaguuucaggacaucugcgugaaggcuuaucuggcccuucgccaucacaccaaucugcucauuauccuguucuccaugaugcugaugacaggcaugccucagcuuaccagcaaggaagauaucgaguacauuagagacgcgcugaccgucggaaagaacgaagaggaugcuaaaaaguauuuucucgaccaaaucgaggugugucgggauaaaggcuggacaguucaguucaacugguuccugcaucucgugcuggggauuaagcagggagaaaaacacuccgccuga

SEQ ID NO: 9228 - protein, 754 aa, Artificial Sequence
  PI3K__Homo_sapiens__Q5UE93
MESSDVELDLQRSVQAVLRELSTQAPALQSNQGMWRWSLHKKVERDPGKSPVLVRILLRELEKAESQDLRHVIIPLLHTVMYVLTKATGITEELYQRIYAFCTRLLTLPTPYCTVALDCAIRLKTEMAVPGTLYQRMVIAEQNLTNELYPYQERVFLFVDPELVSASVCSALLLEIEAAQAQQTPETCMRHVVSHALQAALGEACHAGALHRKLQASPRRTLEHYFHAVVAALEQMASEASPSREGHVERLEEIYCSLLGPAAGRCGGDLVQERPPSIPLPSPYITFHLWTGEEQLWKELVLFLRPRSQLRLSADLEVLDLQGLRPDRELARVSVLSTDSGIERDLPTGADELPAPGSPEMERAGLQRKGGIKKRAWPLDFLMPGSWDGPPGLHRRTGRPSGDGEMLPGVSRLHTARVLVLGDDRMLGRLAQAYHRLRKRETQKFCLTPRLSLQLYYIPVLAPEKPAASRQPELGELATFLGRVDPWYQSNVNTLCPAIHKLAEMPPSLDTSRTVDPFILDVITYYIRMGTQPIYFQIYTVKIFFSDLSQDPTEDIFLIELKVKIQDSKFPKDGFSPRRRGVAEGPGAELSLCYQKALLSHRPREVTVSLRATGLILKAIPASDTEVSGSSHCPLPAAPVTDHTCLNVNVTEVVKSSNLAGKSFSTVTNTFRTNNIQIQSRDQRLLTLSLDKDDQRTFRDVVRFEVAPCPEPCSGAQKSKAPWLNLHGQQEVEAIKAKPKPLLMPINTFSGIVQ

SEQ ID NO: 9229 - RNA, 2265 nt, Artificial Sequence
  PI3K__Homo_sapiens__AAV30085
auggagagcucagauguggagcuggaccuccagaggagcgugcaggcugugcuccgggagcucagcacccaggccccugcccugcagagcaaccaaggcauguggagguggucccugcacaagaaggucgagcgagaucccgguaagagcccagugcugguccgcauucuucucagagaacuggagaaggcggaaagccaggaccuccggcaugucaucauucccuugcugcacacuguaauguacgugcucaccaaggccacaggaaucacagaagagcucuaccagagaaucuaugccuuuugcacaagguuacugacccugcccacccccuacugcacagucgccuuggacugcgcgauaaggcugaaaacggagauggcugucccagggacacuguaccaaaggauggucauugccgaacagaacuugacgaaugagcuguaucccuaccaggagagaguguuccucuucguggauccugagcuggugucugcgucugugugcagugcucugcuacuggagaucgaggcggcccaggcgcagcagacaccagagaccugcaugcgccacguggucucccacgcccugcaggcggcucugggggaggccugucacgcaggcgcucugcacaggaagcugcaggccagcccucgccgcacccuggagcacuauuuccacgccgugguggccgccuuggagcagauggccagcgaggccagcccgagccgggagggacacguagagaggcuggaggagauuuacugcucgcugcugggucccgcggcggggcgcugcgguggugaccuuguccaagagcggccaccaagcauuccccugcccagccccuacaucaccuuccacuuguggaccggugaggagcagcucuggaaggaacuggugcucuuccuccgcccaagaucccagcugcgccucagugcugacuuggaggucuuggaucugcagggccuccggccggaccgggaguuggcccggguuucugugcuguccacugacagcggcauugagcgggaccuucccacgggggcugaugagcugccugcacccggcagcccugagauggagcgagccgggcugcagcgcaaagggggcaucaagaagcgugcauggccccuggacuucuugaugccuggcagcugggacgggcccccagggcugcaccggaggacaggccggcccaguggggauggggaaaugcugcccggcgugucccggcugcacacagcccggguacuugugcucggagaugacaggaugcuggggcgccuggcccaggccuaccacagacucaggaaacgggagacccagaaguucugccucacucccagacucagccugcagcucuacuacauccccgugcuggcgccugagaagccugcagcauccaggcagccggagcugggagagcuggcuacguuccugggccgcguagacccgugguaccagagcaacgucaacacgcugugccccgccauccacaagcuggcugagaugccuccuucccuggacacaucccggacuguggaccccuucauccuagacgucaucaccuacuacauccgcaugggcacccaacccaucuauuuccagaucuacacagucaagaucuuuuucagugaccugagccaagacccuacugaggacauuuuccucauugaacugaaggugaagauccaagauucuaaauuccccaaagauggcuuuucacccaggaggagaggcguggcugagggcccaggggcagagcucucccuaugcuaccagaaggccuugcuuagccaccggccccgagaggucaccguuucccugcgggccacugggcugauccugaaggccauuccagccagcgacacagaaguuucagggucuagccauugcccccugccugcugcuccugucacagaccacacaugucugaaugucaacgugacagagguugucaaguccuccaacuuggcgggaaaguccuucucuacagugaccaacaccuucaggacgaacaauauccagauccagagccgggaccagaggcugcugacacugucgcuggacaaggacgaucaacgcacuuucagggauguggucagauucgagguugcucccugcccagaaccauguucuggggcccagaaguccaaggcaccguggcucaauuugcaugggcaacaggagguggaagcaaucaaagccaagcccaagccccuucugaugcccaucaacacauucucugguauuguccaguga

SEQ ID NO: 9230 - RNA, 2265 nt, Artificial Sequence
  derived and/or modified sequence opt1 from PI3K__Homo_sapiens__AAV30085
auggagagcuccgacguggagcuggaccuccagcgcagcguccaggccgugcugcgggagcuguccacccaggcccccgcgcuccagagcaaccagggcauguggcgcuggucccugcacaagaagguggagcgggacccggggaagucccccguccuggugcgcauccuccugcgggagcuggagaaggccgagucccaggaccuccgccacgugaucaucccccugcugcacaccgucauguacgugcucacgaaggccaccggcaucaccgaggagcuguaccagcggaucuacgccuucugcacccgccugcucacgcugcccaccccguacugcaccguggcccuggacugcgcgauccggcucaagaccgagauggccguccccgggacgcuguaccagcgcauggugaucgccgagcagaaccugaccaacgagcucuaccccuaccaggagcggguguuccuguucgucgaccccgagcuggugagcgccuccgugugcagcgcgcuccugcuggagaucgaggccgcccaggcccagcagaccccggagaccugcaugcgccacgucgugucccacgcccuccaggcggcccugggcgaggccugccacgccggggcccugcaccggaagcuccaggcgagcccccgccggacgcuggagcacuacuuccacgccguggucgccgcccuggagcagauggccuccgaggcgagccccucccgcgagggccacguggagcggcucgaggagaucuacugcagccugcugggccccgccgccgggcgcugcggcggggaccucgugcaggagcggccgcccuccaucccccugcccagcccguacaucaccuuccaccuguggaccggcgaggagcagcucuggaaggagcugguccuguuccuccgcccccggucccagcugcgccugagcgccgaccucgaggugcuggaccugcaggggcuccgccccgaccgggagcuggcccgcgugagcguccuguccaccgacagcggcaucgagcgggaccugcccacgggcgcggacgagcucccggcccccgggucccccgagauggagcgcgccggccugcagcggaagggcgggaucaagaagcgcgccuggccccuggacuuccucaugccgggcagcugggacgggccgcccggccugcaccggcgcaccgggcggcccuccggcgacggggagaugcugcccggcgugagccgccuccacaccgcgcggguccuggugcugggcgacgaccgcaugcucgggcggcuggcccaggccuaccaccgccugcggaagcgcgagacccagaaguucugccucacgccccggcugucccugcagcucuacuacauccccgugcuggccccggagaagcccgccgcgagccgccagcccgagcugggcgagcucgccaccuuccuggggcgggucgaccccugguaccaguccaacgugaacacccugugcccggccauccacaagcucgccgagaugccgcccagccuggacaccucccgcacgguggaccccuucauccuggacgucaucaccuacuacauccgcaugggcacccagcccaucuacuuccagaucuacaccgugaagaucuucuucagcgaccucucccaggaccccacggaggacaucuuccugaucgagcugaaggugaagauccaggacagcaaguuccccaaggacggguucagcccccggcgccggggcgucgccgagggcccgggggcggagcucagccugugcuaccagaaggcccugcucucccaccgcccccgggaggugaccgugagccugcgcgccaccggccugauccucaaggccauccccgccuccgacaccgaggucagcgggagcucccacugcccccugccggcggcccccgugacggaccacacgugccugaacgugaacgucaccgagguggucaagagcuccaaccucgccggcaagagcuucuccaccgugaccaacaccuuccggaccaacaacauccagauccagagccgcgaccagcggcugcugacccucucccuggacaaggacgaccagcgcaccuuccgggacguggugcgcuucgaggucgcccccugccccgagccgugcagcggggcgcagaaguccaaggcccccuggcugaaccuccacggccagcaggagguggaggccaucaaggccaagcccaagccccugcugaugccgaucaacacguucagcggcaucgugcaguga

SEQ ID NO: 9231 - RNA, 2265 nt, Artificial Sequence
  derived and/or modified sequence opt2 from PI3K__Homo_sapiens__AAV30085
auggaguccuccgacgucgagcucgaccuccagcgcuccguccaggccguccuccgcgagcucuccacccaggcccccgcccuccaguccaaccagggcauguggcgcuggucccuccacaagaaggucgagcgcgaccccggcaagucccccguccucguccgcauccuccuccgcgagcucgagaaggccgagucccaggaccuccgccacgucaucaucccccuccuccacaccgucauguacguccucaccaaggccaccggcaucaccgaggagcucuaccagcgcaucuacgccuucugcacccgccuccucacccuccccacccccuacugcaccgucgcccucgacugcgccauccgccucaagaccgagauggccguccccggcacccucuaccagcgcauggucaucgccgagcagaaccucaccaacgagcucuaccccuaccaggagcgcgucuuccucuucgucgaccccgagcucgucuccgccuccgucugcuccgcccuccuccucgagaucgaggccgcccaggcccagcagacccccgagaccugcaugcgccacgucgucucccacgcccuccaggccgcccucggcgaggccugccacgccggcgcccuccaccgcaagcuccaggccuccccccgccgcacccucgagcacuacuuccacgccgucgucgccgcccucgagcagauggccuccgaggccucccccucccgcgagggccacgucgagcgccucgaggagaucuacugcucccuccucggccccgccgccggccgcugcggcggcgaccucguccaggagcgcccccccuccaucccccuccccucccccuacaucaccuuccaccucuggaccggcgaggagcagcucuggaaggagcucguccucuuccuccgcccccgcucccagcuccgccucuccgccgaccucgagguccucgaccuccagggccuccgccccgaccgcgagcucgcccgcgucuccguccucuccaccgacuccggcaucgagcgcgaccuccccaccggcgccgacgagcuccccgcccccggcucccccgagauggagcgcgccggccuccagcgcaagggcggcaucaagaagcgcgccuggccccucgacuuccucaugcccggcuccugggacggcccccccggccuccaccgccgcaccggccgccccuccggcgacggcgagaugcuccccggcgucucccgccuccacaccgcccgcguccucguccucggcgacgaccgcaugcucggccgccucgcccaggccuaccaccgccuccgcaagcgcgagacccagaaguucugccucaccccccgccucucccuccagcucuacuacauccccguccucgcccccgagaagcccgccgccucccgccagcccgagcucggcgagcucgccaccuuccucggccgcgucgaccccugguaccaguccaacgucaacacccucugccccgccauccacaagcucgccgagaugccccccucccucgacaccucccgcaccgucgaccccuucauccucgacgucaucaccuacuacauccgcaugggcacccagcccaucuacuuccagaucuacaccgucaagaucuucuucuccgaccucucccaggaccccaccgaggacaucuuccucaucgagcucaaggucaagauccaggacuccaaguuccccaaggacggcuucuccccccgccgccgcggcgucgccgagggccccggcgccgagcucucccucugcuaccagaaggcccuccucucccaccgcccccgcgaggucaccgucucccuccgcgccaccggccucauccucaaggccauccccgccuccgacaccgaggucuccggcuccucccacugcccccuccccgccgcccccgucaccgaccacaccugccucaacgucaacgucaccgaggucgucaaguccuccaaccucgccggcaaguccuucuccaccgucaccaacaccuuccgcaccaacaacauccagauccagucccgcgaccagcgccuccucacccucucccucgacaaggacgaccagcgcaccuuccgcgacgucguccgcuucgaggucgcccccugccccgagcccugcuccggcgcccagaaguccaaggcccccuggcucaaccuccacggccagcaggaggucgaggccaucaaggccaagcccaagccccuccucaugcccaucaacaccuucuccggcaucguccaguga

SEQ ID NO: 9232 - RNA, 2265 nt, Artificial Sequence
  derived and/or modified sequence opt3 from PI3K__Homo_sapiens__AAV30085
auggagagcuccgacguggaacuggaucuccagagaucuguccaagccguucuuagggagcugucaacccaggcucccgcauugcagaguaaccagggcauguggcgguggagcuuacacaagaaaguggaacgcgacccugggaaguccccaguacuggugcgaauccuacuccgugagcuggaaaaagccgagucucaagaucuuagacaugucauuauaccgcuguugcacacagugauguacguucucacuaaggcgacgggaaucaccgaggaacuguaucagaggauuuacgcuuucugcacacggcugcucacuuuacccaccccuuauuguacaguggcccuggacugcgcaauccgccuuaaaaccgagauggccgucccagguacuuuguaccagagaauggugauugcugaacagaaucugacaaacgagcuauaucccuaccaagagaggguauuucucuucguugauccugaacuggugucggcaucagucuguagcgcccuucuguuggagaucgaagcugcccaggcgcagcagaccccagagacgugcaugcggcauguggugagucacgcacuccaagccgcucugggcgaagccugucaugcaggggcuuuacaccgcaagcugcaggccucuccccgaagaacucucgagcacuauuuucaugcggucguugccgcacuugagcagauggcuuccgaagccagcccuuccagggagggacacguggaacggcuggaggaaauauacugcucauugcuaggcccagcugccggucguugugggggagaccugguacaagagcgcccgcccaguaucccucucccaagccccuacauuaccuuccaucuguggacaggcgaggaacagcuuuggaaggagcugguguuguuucucagaccuaggucucagcugcgguuauccgcagaucuggaaguccuagaccuccagggccugcgaccagaucgcgagcuugccagagugucaguuuugagcacugacagugggaucgaaagggaucugcccaccggagcugacgagcucccggcgccugguucucccgagauggaacgggcaggccugcaacgcaaagggggaauuaagaaaagagccuggccacuugauuuccugaugccuggcuccugggacggucccccaggguugcacaggcguacaggacggcccagcggcgacggcgagaugcucccuggggugucgcgacugcacaccgcuagagucuuagugcugggagaugacaggaugcuaggucgccucgcccaggcauaucaucggcugagaaagagggaaacgcagaaauuuugccuuacuccacgcuugucucugcagcucuacuauaucccgguacuggcccccgagaagccugcugccucccgacaaccagaguuaggcgaacuggcaacauuccuugggcggguugaucccugguaccagucaaaugugaacaccuuguguccugcgauacacaagcucgcugagaugccacccagucuggacacuagccguacagucgauccguuuauucuagacgugaucaccuauuacauuagaaugggaacgcagccuaucuauuuccagaucuacaccgucaaaauauuuuucuccgaucugucucaagacccaacagaagauauuuuucucaucgagcugaaggugaaaauucaggacagcaaguuccccaaagauggcuucucaccuaggcgccgggguguugccgaagggcccggcgcagagcuuaguuugugcuaccagaaggcccuguuaucccauagaccaagggaggugacuguaagccuccgagcuaccggacugauccuuaaagccauaccugcaucugacacagaagucucaggcaguagccacuguccccugccagcugccccggugacugaccauaccugcuugaauguuaacgugacagaggucgugaaguccucuaaucucgcggggaagucguuuagcaccguaacuaacacguuccgcacaaauaacauucagauccaaucccgggaucagagacugcuaacccugucacucgacaaagaugaccagaggacuuuucgugaugugguucgcuucgaagucgccccuugccccgagccauguaguggagcucaaaagucuaaagcacccuggcugaaucuucacggucagcaggaaguggaggccaucaaggcuaaaccuaagccauugcugaugcccauuaacaccuuuagcggcaucgugcaguga

SEQ ID NO: 9233 - RNA, 2265 nt, Artificial Sequence
  derived and/or modified sequence opt4 from PI3K__Homo_sapiens__AAV30085
auggagagcagcgacguggagcuggaccugcagagaagcgugcaggccgugcugagagagcugagcacccaggcccccgcccugcagagcaaccagggcauguggagauggagccugcacaagaagguggagagagaccccggcaagagccccgugcuggugagaauccugcugagagagcuggagaaggccgagagccaggaccugagacacgugaucaucccccugcugcacaccgugauguacgugcugaccaaggccaccggcaucaccgaggagcuguaccagagaaucuacgccuucugcaccagacugcugacccugcccacccccuacugcaccguggcccuggacugcgccaucagacugaagaccgagauggccgugcccggcacccuguaccagagaauggugaucgccgagcagaaccugaccaacgagcuguaccccuaccaggagagaguguuccuguucguggaccccgagcuggugagcgccagcgugugcagcgcccugcugcuggagaucgaggccgcccaggcccagcagacccccgagaccugcaugagacacguggugagccacgcccugcaggccgcccugggcgaggccugccacgccggcgcccugcacagaaagcugcaggccagccccagaagaacccuggagcacuacuuccacgccgugguggccgcccuggagcagauggccagcgaggccagccccagcagagagggccacguggagagacuggaggagaucuacugcagccugcugggccccgccgccggcagaugcggcggcgaccuggugcaggagagaccccccagcaucccccugcccagccccuacaucaccuuccaccuguggaccggcgaggagcagcuguggaaggagcuggugcuguuccugagacccagaagccagcugagacugagcgccgaccuggaggugcuggaccugcagggccugagacccgacagagagcuggccagagugagcgugcugagcaccgacagcggcaucgagagagaccugcccaccggcgccgacgagcugcccgcccccggcagccccgagauggagagagccggccugcagagaaagggcggcaucaagaagagagccuggccccuggacuuccugaugcccggcagcugggacggcccccccggccugcacagaagaaccggcagacccagcggcgacggcgagaugcugcccggcgugagcagacugcacaccgccagagugcuggugcugggcgacgacagaaugcugggcagacuggcccaggccuaccacagacugagaaagagagagacccagaaguucugccugacccccagacugagccugcagcuguacuacauccccgugcuggcccccgagaagcccgccgccagcagacagcccgagcugggcgagcuggccaccuuccugggcagaguggaccccugguaccagagcaacgugaacacccugugccccgccauccacaagcuggccgagaugccccccagccuggacaccagcagaaccguggaccccuucauccuggacgugaucaccuacuacaucagaaugggcacccagcccaucuacuuccagaucuacaccgugaagaucuucuucagcgaccugagccaggaccccaccgaggacaucuuccugaucgagcugaaggugaagauccaggacagcaaguuccccaaggacggcuucagccccagaagaagaggcguggccgagggccccggcgccgagcugagccugugcuaccagaaggcccugcugagccacagacccagagaggugaccgugagccugagagccaccggccugauccugaaggccauccccgccagcgacaccgaggugagcggcagcagccacugcccccugcccgccgcccccgugaccgaccacaccugccugaacgugaacgugaccgagguggugaagagcagcaaccuggccggcaagagcuucagcaccgugaccaacaccuucagaaccaacaacauccagauccagagcagagaccagagacugcugacccugagccuggacaaggacgaccagagaaccuucagagacguggugagauucgagguggcccccugccccgagcccugcagcggcgcccagaagagcaaggcccccuggcugaaccugcacggccagcaggagguggaggccaucaaggccaagcccaagccccugcugaugcccaucaacaccuucagcggcaucgugcaguga

SEQ ID NO: 9234 - RNA, 2265 nt, Artificial Sequence
  derived and/or modified sequence opt5 from PI3K__Homo_sapiens__AAV30085
auggagagcuccgacguggaacuggaucuccagagaucuguccaagccguucugcgggagcuuagcacccaggcucccgcccugcaguccaaccagggcauguggcgcuggucucuccacaagaaaguggaaagagacccuggaaagagcccggugcugguccggauccuucugcgcgagcucgaaaaagcggagucccaagaucugagacaugugauuaucccccugcuccacacaguuauguacgugcugacgaaggcuaccgggauuacagaggaacuuuaucagcggaucuacgccuucugcacccgccugcucacacugccuacccccuauuguacagucgcccuugacugcgcuauuagacugaaaaccgagauggccgugccuggcacgcucuaccagcggaugguuaucgcugaacagaaucugaccaacgagcuguaucccuaccaagagcgcguguuucucuucgucgauccugaacuggugucugccagcguguguuccgcgcuucugcucgagaucgaagccgcucaggcccagcagacaccggagaccugcaugagacaugucguuagccacgcucugcaagccgcgcuuggggaagccugucaugcuggagcccugcaccggaagcuccaggcuucuccccgcagaacacuggagcacuauuuucaugccgugguggccgcucuggagcagauggcguccgaagccagcccuucucgggagggccacgucgaacgccucgaggaaauuuacugcucccugcuugggcccgcugccggaagauguggcggcgaccuggugcaagagcggccucccagcaucccgcucccuucucccuacauuaccuuccaucuguggacgggggaggaacagcuuuggaaggagcugguucucuuucugagaccucgcucccagcugcggcucagcgccgaucuggaagugcuugaccugcagggacucagacccgaucgcgagcuggcucgggucuccgugcugucuacagacagcggcaucgaaagagaucuucccaccggggccgacgagcucccugcgccgggaucccccgagauggaacgcgcuggccugcaacggaaagggggaauuaagaaaagagccuggccucuggauuuccucaugcccggcagcugggacggcccucccgggcugcaccgccggacaggaagaccgucuggcgacggggagaugcuuccuggaguuucccgccugcacaccgcccgggugcucguccugggcgaugacagaaugcuggggcggcuugcucaggccuaucaucgccucagaaagcgggaaacccagaaauuuugccugacacccagacugagccuccagcuguacuauaucccugugcuugcucccgagaagccugccgcgucucgccaacccgagcugggagaacucgccacguuccugggccgggucgauccgugguaccagagcaaugugaacacccuguguccugcuauucacaaacuugccgagaugccucccucccucgacacaucuagaaccguugaucccuuuauccuggacgugaucacauauuacauucgcaugggcacccagccgaucuauuuccagauuuacacggucaagaucuuuuucagcgaucugucccaagaccccacagaagauauuuuucucaucgagcugaaggugaaaauccaggacagcaaguucccuaaagauggguucucucccagacggcgcggaguugcugaaggcccuggggccgagcuuucccugugcuaccagaaggcgcuccugagccauagaccccgggaggugaccgucucucugcgcgccaccggacuuauucucaaagcuaucccugccuccgacacagaagugagcggcuccucucacuguccccugccggcugccccugugaccgaccauacaugccugaauguuaacgucacggagguggucaagagcuccaaucucgccgggaagucuuuuagcaccgugacaaacaccuucagaacaaauaacauucagauccaaucccgggaucagcgccugcuuacccugagccucgacaaagaugaccagagaacguuucgggaugugguucgcuucgaaguggcucccugcccugagcccuguucuggcgcgcaaaaguccaaagccccguggcugaaucugcacggacagcaggaagucgaggcuauuaaggccaaaccuaagccccuucugaugccuaucaacaccuuuagcggcaucgugcaguga

SEQ ID NO: 9235 - protein, 887 aa, Artificial Sequence
  PI3K__Homo_sapiens__Q8NEB9
MGEAEKFHYIYSCDLDINVQLKIGSLEGKREQKSYKAVLEDPMLKFSGLYQETCSDLYVTCQVFAEGKPLALPVRTSYKAFSTRWNWNEWLKLPVKYPDLPRNAQVALTIWDVYGPGKAVPVGGTTVSLFGKYGMFRQGMHDLKVWPNVEADGSEPTKTPGRTSSTLSEDQMSRLAKLTKAHRQGHMVKVDWLDRLTFREIEMINESEKRSSNFMYLMVEFRCVKCDDKEYGIVYYEKDGDESSPILTSFELVKVPDPQMSMENLVESKHHKLARSLRSGPSDHDLKPNAATRDQLNIIVSYPPTKQLTYEEQDLVWKFRYYLTNQEKALTKFLKCVNWDLPQEAKQALELLGKWKPMDVEDSLELLSSHYTNPTVRRYAVARLRQADDEDLLMYLLQLVQALKYENFDDIKNGLEPTKKDSQSSVSENVSNSGINSAEIDSSQIITSPLPSVSSPPPASKTKEVPDGENLEQDLCTFLISRACKNSTLANYLYWYVIVECEDQDTQQRDPKTHEMYLNVMRRFSQALLKGDKSVRVMRSLLAAQQTFVDRLVHLMKAVQRESGNRKKKNERLQALLGDNEKMNLSDVELIPLPLEPQVKIRGIIPETATLFKSALMPAQLFFKTEDGGKYPVIFKHGDDLRQDQLILQIISLMDKLLRKENLDLKLTPYKVLATSTKHGFMQFIQSVPVAEVLDTEGSIQNFFRKYAPSENGPNGISAEVMDTYVKSCAGYCVITYILGVGDRHLDNLLLTKTGKLFHIDFGYILGRDPKPLPPPMKLNKEMVEGMGGTQSEQYQEFRKQCYTAFLHLRRYSNLILNLFSLMVDANIPDIALEPDKTVKKVQDKFRLDLSDEEAVHYMQSLIDESVHALFAAVVEQIHKFAQYWRK

SEQ ID NO: 9236 - RNA, 2664 nt, Artificial Sequence
  PI3K__Homo_sapiens__AAH33004
augggggaagcagagaaguuucacuacaucuauaguugugaccuggauaucaacguccagcuuaagauaggaagcuuggaagggaagagagaacaaaagaguuauaaagcuguccuggaagacccaauguugaaguucucaggacuauaucaagagacaugcucugaucuuuauguuacuugucaaguuuuugcagaagggaagccuuuggccuugccagugagaacauccuacaaagcauuuaguacaagauggaacuggaaugaauggcugaaacuaccaguaaaauacccugaccugcccaggaaugcccaaguggcccucaccauaugggauguguauggucccggaaaagcagugccuguaggaggaacaacgguuucgcucuuuggaaaauacggcauguuucgccaagggaugcaugacuugaaagucuggccuaauguagaagcagauggaucagaacccacaaaaacuccuggcagaacaaguagcacucucucagaagaucagaugagccgucuugccaagcucaccaaagcucaucgacaaggacacauggugaaaguagauuggcuggauagauugacauuuagagaaauagaaaugauaaaugagagugaaaaacgaaguucuaauuucauguaccugaugguugaauuucgaugugucaagugugaugauaaggaauaugguauuguuuauuaugaaaaggacggugaugaaucaucuccaauuuuaacaaguuuugaauuagugaaaguuccugacccccagaugucuauggagaauuuaguugagagcaaacaccacaagcuugcccggaguuuaagaaguggaccuucugaccacgaucugaaacccaaugcugccacgagagaucaguuaaauauuauugugaguuauccaccaaccaagcaacuuacauaugaagaacaagaucuuguuuggaaguuuagauauuaucuuacgaaucaagaaaaagccuugacaaaauucuugaaauguguuaauugggaucuaccucaagaggccaaacaggccuuggaacuucugggaaaauggaagccgauggauguagaggacuccuuggagcuguuauccucucauuacaccaacccaacugugaggcguuaugcuguugcccgguugcgacaggccgaugaugaggauuuguugauguaccuauuacaauugguccaggcucucaaauaugaaaauuuugaugauauaaagaauggauuggaaccuaccaagaaggauagucagaguucagugucagaaaaugugucaaauucuggaauaaauucugcagaaauagauagcucccaaauuauaaccagcccccuuccuucagucucuucaccuccuccugcaucaaaaacaaaagaaguuccagauggcgaaaaucuggaacaagaucucuguaccuucuugauaucgagagccugcaaaaacucaacacuggcuaauuauuuauacugguaugugauaguggaaugugaagaucaagauacucagcagagagauccaaagacccaugagauguacuugaacguaaugagaagauucagccaagcauuguugaagggugauaagucugucagaguuaugcguucuuugcuggcugcacaacagacauuuguagaucgguuggugcaucuaaugaaggcaguacaacgcgaaaguggaaaucguaagaaaaagaaugagagacuacaggcauugcuuggagauaaugaaaagaugaauuugucagauguggaacuuaucccguugccuuuagaaccccaagugaaaauuagaggaauaauuccggaaacagcuacacuguuuaaaagugcccuuaugccugcacaguuguuuuuuaagacggaagauggaggcaaauauccaguuauauuuaagcauggagaugauuuacgucaagaucaacuuauucuucaaaucauuucacucauggacaagcuguuacggaaagaaaaucuggacuugaaauugacaccuuauaagguguuagccaccaguacaaaacauggcuucaugcaguuuauccagucaguuccuguggcugaaguucuugauacagagggaagcauucagaacuuuuuuagaaaauaugcaccaagugagaaugggccaaaugggauuagugcugaggucauggacacuuacguuaaaagcugugcuggauauugcgugaucaccuauauacuuggaguuggagacaggcaccuggauaaccuuuugcuaacaaaaacaggcaaacucuuccacauagacuuuggauauauuuugggucgggauccaaagccucuuccuccaccaaugaagcugaauaaagaaaugguagaaggaauggggggcacacagagugagcaguaccaagaguuccguaaacaguguuacacggcuuuccuccaccugcgaagguauucuaaucugauuuugaacuuguuuuccuugaugguugaugcaaacauuccagauauugcacuugaaccagauaaaacugugaaaaagguucaggauaaauuccgcuuagaccugucggaugaagaggcugugcauuacaugcagagucugauugaugagaguguccaugcucuuuuugcugcagugguggaacagauucacaaguuugcccaguacuggagaaaauga

SEQ ID NO: 9237 - RNA, 2664 nt, Artificial Sequence
  derived and/or modified sequence opt1 from PI3K__Homo_sapiens__AAH33004
augggcgaggccgagaaguuccacuacaucuacagcugcgaccuggacaucaacgugcagcucaagaucgggucccuggagggcaagcgcgagcagaaguccuacaaggccguccuggaggaccccaugcucaaguucuccgggcuguaccaggagaccugcagcgaccuguacgugaccugccagguguucgcggagggcaagccccucgcccugcccguccggacguccuacaaggccuucagcacccgcuggaacuggaacgaguggcugaagcuccccgugaaguaccccgaccugccgcggaacgcccagguggcccugaccaucugggacgucuacgggcccggcaaggcggugcccgugggcgggaccacggucucccucuucggcaaguacgggauguuccgccagggcaugcacgaccugaagguguggcccaacguggaggccgacgggagcgagccgaccaagacccccggccggaccuccagcacgcuguccgaggaccagaugagccgccucgccaagcugaccaaggcccaccggcagggccacauggucaagguggacuggcuggaccgccucaccuuccgggagaucgagaugaucaacgaguccgagaagcgcagcuccaacuucauguaccugaugguggaguuccggugcgucaagugcgacgacaaggaguacgggaucguguacuacgagaaggacggcgacgagagcucccccauccugaccagcuucgagcucgugaagguccccgacccgcagauguccauggagaaccugguggagagcaagcaccacaagcuggcgcgcagccuccgguccgggcccagcgaccacgaccugaagcccaacgccgccacgcgcgaccagcugaacaucaucguguccuacccgcccaccaagcagcucaccuacgaggagcaggaccuggucuggaaguuccgguacuaccugaccaaccaggagaaggcccucacgaaguuccugaagugcgugaacugggaccugccccaggaggccaagcaggcgcucgagcugcugggcaaguggaagcccauggacguggaggacagccucgagcugcuguccagccacuacaccaaccccaccguccgccgguacgccguggcccgccuccggcaggccgacgacgaggaccugcugauguaccuccugcagcugguccaggcccucaaguacgagaacuucgacgacaucaagaacggccuggagccgaccaagaaggacucccagagcuccgugagcgagaacguguccaacagcgggaucaacuccgcggagaucgacagcucccagaucaucacgagcccccugcccuccgucagcagcccgccgcccgccagcaagaccaaggaggugcccgacggcgagaaccucgagcaggaccugugcaccuuccugaucagccgcgccugcaagaacuccacccuggccaacuaccucuacugguacgugaucgucgagugcgaggaccaggacacgcagcagcgggaccccaagacccacgagauguaccugaacgugaugcgccgcuucagccaggcccugcucaagggggacaaguccgugcgggucaugcgcagccugcuggcggcccagcagaccuucguggaccggcucgugcaccugaugaaggccguccagcgcgaguccggcaaccggaagaagaagaacgagcgccugcaggcccuccugggggacaacgagaagaugaaccugagcgacguggagcucaucccccugccccuggagccccaggugaagauccggggcaucaucccggagaccgccacccucuucaaguccgcgcugaugcccgcccagcuguucuucaagacggaggacggcgggaaguaccccgucaucuucaagcacggcgacgaccuccgccaggaccagcugauccugcagaucaucagccucauggacaagcugcugcggaaggagaaccucgaccugaagcugacccccuacaaggugcucgccaccuccacgaagcacggguucaugcaguucauccagagcgugccggucgccgaggugcuggacaccgagggcuccauccagaacuucuuccgcaaguacgcgcccagcgagaacgggcccaacggcaucuccgccgaggugauggacaccuacgucaagagcugcgccggcuacugcgugaucaccuacauccugggggugggcgaccggcaccucgacaaccugcugcucacgaagaccgggaagcuguuccacaucgacuucggcuacauccuggggcgcgaccccaagccgcucccgccgcccaugaagcugaacaaggagauggucgagggcaugggcgggacccaguccgagcaguaccaggaguuccggaagcagugcuacaccgccuuccugcaccuccgccgguacagcaaccugauccugaaccucuucucccugaugguggacgccaacauccccgacaucgcgcuggagcccgacaagaccgugaagaagguccaggacaaguuccgccucgaccugagcgacgaggaggccgugcacuacaugcagagccugaucgacgaguccgugcacgcccucuucgccgccgucguggagcagauccacaaguucgcgcaguacuggcggaaguga

SEQ ID NO: 9238 - RNA, 2664 nt, Artificial Sequence
  derived and/or modified sequence opt2 from PI3K__Homo_sapiens__AAH33004
augggcgaggccgagaaguuccacuacaucuacuccugcgaccucgacaucaacguccagcucaagaucggcucccucgagggcaagcgcgagcagaaguccuacaaggccguccucgaggaccccaugcucaaguucuccggccucuaccaggagaccugcuccgaccucuacgucaccugccaggucuucgccgagggcaagccccucgcccuccccguccgcaccuccuacaaggccuucuccacccgcuggaacuggaacgaguggcucaagcuccccgucaaguaccccgaccucccccgcaacgcccaggucgcccucaccaucugggacgucuacggccccggcaaggccguccccgucggcggcaccaccgucucccucuucggcaaguacggcauguuccgccagggcaugcacgaccucaaggucuggcccaacgucgaggccgacggcuccgagcccaccaagacccccggccgcaccuccuccacccucuccgaggaccagaugucccgccucgccaagcucaccaaggcccaccgccagggccacauggucaaggucgacuggcucgaccgccucaccuuccgcgagaucgagaugaucaacgaguccgagaagcgcuccuccaacuucauguaccucauggucgaguuccgcugcgucaagugcgacgacaaggaguacggcaucgucuacuacgagaaggacggcgacgaguccucccccauccucaccuccuucgagcucgucaagguccccgacccccagauguccauggagaaccucgucgaguccaagcaccacaagcucgcccgcucccuccgcuccggccccuccgaccacgaccucaagcccaacgccgccacccgcgaccagcucaacaucaucgucuccuacccccccaccaagcagcucaccuacgaggagcaggaccucgucuggaaguuccgcuacuaccucaccaaccaggagaaggcccucaccaaguuccucaagugcgucaacugggaccucccccaggaggccaagcaggcccucgagcuccucggcaaguggaagcccauggacgucgaggacucccucgagcuccucuccucccacuacaccaaccccaccguccgccgcuacgccgucgcccgccuccgccaggccgacgacgaggaccuccucauguaccuccuccagcucguccaggcccucaaguacgagaacuucgacgacaucaagaacggccucgagcccaccaagaaggacucccaguccuccgucuccgagaacgucuccaacuccggcaucaacuccgccgagaucgacuccucccagaucaucaccuccccccuccccuccgucuccucccccccccccgccuccaagaccaaggagguccccgacggcgagaaccucgagcaggaccucugcaccuuccucaucucccgcgccugcaagaacuccacccucgccaacuaccucuacugguacgucaucgucgagugcgaggaccaggacacccagcagcgcgaccccaagacccacgagauguaccucaacgucaugcgccgcuucucccaggcccuccucaagggcgacaaguccguccgcgucaugcgcucccuccucgccgcccagcagaccuucgucgaccgccucguccaccucaugaaggccguccagcgcgaguccggcaaccgcaagaagaagaacgagcgccuccaggcccuccucggcgacaacgagaagaugaaccucuccgacgucgagcucaucccccucccccucgagccccaggucaagauccgcggcaucauccccgagaccgccacccucuucaaguccgcccucaugcccgcccagcucuucuucaagaccgaggacggcggcaaguaccccgucaucuucaagcacggcgacgaccuccgccaggaccagcucauccuccagaucaucucccucauggacaagcuccuccgcaaggagaaccucgaccucaagcucacccccuacaagguccucgccaccuccaccaagcacggcuucaugcaguucauccaguccguccccgucgccgagguccucgacaccgagggcuccauccagaacuucuuccgcaaguacgcccccuccgagaacggccccaacggcaucuccgccgaggucauggacaccuacgucaaguccugcgccggcuacugcgucaucaccuacauccucggcgucggcgaccgccaccucgacaaccuccuccucaccaagaccggcaagcucuuccacaucgacuucggcuacauccucggccgcgaccccaagccccuccccccccccaugaagcucaacaaggagauggucgagggcaugggcggcacccaguccgagcaguaccaggaguuccgcaagcagugcuacaccgccuuccuccaccuccgccgcuacuccaaccucauccucaaccucuucucccucauggucgacgccaacauccccgacaucgcccucgagcccgacaagaccgucaagaagguccaggacaaguuccgccucgaccucuccgacgaggaggccguccacuacaugcagucccucaucgacgaguccguccacgcccucuucgccgccgucgucgagcagauccacaaguucgcccaguacuggcgcaaguga

SEQ ID NO: 9239 - RNA, 2664 nt, Artificial Sequence
  derived and/or modified sequence opt3 from PI3K__Homo_sapiens__AAH33004
augggcgaggccgaaaaguuccacuacaucuauagcugcgaccuggauauuaacgugcagcucaaaauagggucccuugagggaaagagagaacaaaaaucuuacaaggcuguccuggaggaccccauguugaaauuuucagguuuauaucaggaaaccuguagugaucuguacguuacaugccagguguucgcagagggcaagccucuagcccucccaguaaggacuagcuauaaggcguuuuccacgcgguggaauuggaacgaguggcugaaacuuccggugaaguaccccgaccugccucgcaaugcucaggucgccuugaccaucugggauguguaugggccaggaaaagcaguucccgugggcgguacaacugucucucucuucgggaaguacggaauguuucgacaaggcaugcaugaccugaaaguguggccuaacguagaagccgauggcucggagccaaccaagacacccgggcguaccucaagcacucugagugaagaccagauguccagacucgcuaaguuaacaaaagcacacaggcagggacauaugguuaagguggauuggcuggaccggcuuaccuuccgcgagauugagaugaucaaugaaucugagaaaagaagcuccaacuuuauguacuugauggucgaguucaggugugugaagugcgaugacaaagaguaugguauuguguacuaugaaaaggauggcgacgagucaaguccuauccugacgagcuuugagcuagucaaaguuccagacccgcagaugucuauggaaaaucucguggaguccaagcaccauaagcuggcccggucacuucgcagcgggcccagugaucacgaccugaaaccuaacgcugccacucgagaucaauugaauauaaucguaucuuacccacccaccaagcagcucacauaugaagaacaggaccugguguggaaauucagauacuauuuaacuaaccaggaaaaggcgcugaccaaauuucucaagugugucaauugggaucuuccucaagaggcaaagcaggcccuggaguugcuaggaaaauggaagccaauggacguggaagauucccuggagcuccugagcucgcacuacacaaaccccaccguuaggcgguacgcuguggcccgucuucgccaggcagacgaugaagaccuguugauguaucuccugcaauuaguccaggcucugaaauacgagaauuucgaugacauuaagaacggccuagaaccgacgaaaaaggacucucaguccucagugagugagaauguaagcaacuccgguaucaacucugccgagauugauagcucacagaucauaacaaguccucuccccuccguuagcucuccaccucccgcgucaaagacuaaagaagugccagacggggagaaucuggaacaagaucuuugcaccuuuuugauuaguagagccuguaagaacagcacucuggcaaauuaucucuacugguaugucaucguggagugcgaggaccaggauacacagcagagggaccccaaaacccaugaaauguaccugaacgucaugcggcgauucucccaagcucugcugaagggagauaaaucugugcgcguuaugagaucguugcucgccgcucagcagacguucguggacaggcugguacacuuaaugaaggccguccagcgggagagcggcaaucgcaagaaaaagaacgaaagacugcaagcacuacucggcgauaaugagaaaaugaaccuguccgacguggaacuuauuccuuugccacuggagccgcagguuaagaucagggggaucauucccgagaccgccacacucuuuaaaucagcucugaugccugcgcaguuauucuuuaagacugaagauggagguaaauauccagugauauucaagcauggcgacgaucugcgucaggaccaacuuaucuugcagauuaucagucucauggacaagcugcuacggaaagagaaucuggaucucaagcugacccccuacaaaguccuugcaacaucuacuaagcacggguuuaugcaguucauacaaagcgugccuguagccgaaguguuggacaccgagggauccauucagaacuuuuuccgaaaauacgcuccaucagaaaauggccccaacgguaucagcgccgagguuauggauacauaugucaagucuugugcaggguacugcgugaucaccuauauucugggcgugggagacagacacuuagauaaucuccugcuuacuaagacgggcaaacuguuucauaucgacuucggguacauuuugggaagggauccgaagccucucccacccccuaugaaacugaacaaggagauggucgaagguaugggcgggacacaguccgagcaguaucaagaauuucgcaaacaguguuacaccgccuuccuacaccuucggagauauaguaaucucauacugaaccuuuuuagcuugaugguugacgcuaacauccccgauauugcccuggagccagacaagacugugaagaaagugcaggauaaguucagguuagaccucucugaugaagaggcaguacauuacaugcagucccugaucgacgagucaguccacgcgcuuuucgcugccgugguugaacaaauccauaaauuugcacaguacuggcgcaaguga

SEQ ID NO: 9240 - RNA, 2664 nt, Artificial Sequence
  derived and/or modified sequence opt4 from PI3K__Homo_sapiens__AAH33004
augggcgaggccgagaaguuccacuacaucuacagcugcgaccuggacaucaacgugcagcugaagaucggcagccuggagggcaagagagagcagaagagcuacaaggccgugcuggaggaccccaugcugaaguucagcggccuguaccaggagaccugcagcgaccuguacgugaccugccagguguucgccgagggcaagccccuggcccugcccgugagaaccagcuacaaggccuucagcaccagauggaacuggaacgaguggcugaagcugcccgugaaguaccccgaccugcccagaaacgcccagguggcccugaccaucugggacguguacggccccggcaaggccgugcccgugggcggcaccaccgugagccuguucggcaaguacggcauguucagacagggcaugcacgaccugaagguguggcccaacguggaggccgacggcagcgagcccaccaagacccccggcagaaccagcagcacccugagcgaggaccagaugagcagacuggccaagcugaccaaggcccacagacagggccacauggugaagguggacuggcuggacagacugaccuucagagagaucgagaugaucaacgagagcgagaagagaagcagcaacuucauguaccugaugguggaguucagaugcgugaagugcgacgacaaggaguacggcaucguguacuacgagaaggacggcgacgagagcagccccauccugaccagcuucgagcuggugaaggugcccgacccccagaugagcauggagaaccugguggagagcaagcaccacaagcuggccagaagccugagaagcggccccagcgaccacgaccugaagcccaacgccgccaccagagaccagcugaacaucaucgugagcuacccccccaccaagcagcugaccuacgaggagcaggaccugguguggaaguucagauacuaccugaccaaccaggagaaggcccugaccaaguuccugaagugcgugaacugggaccugccccaggaggccaagcaggcccuggagcugcugggcaaguggaagcccauggacguggaggacagccuggagcugcugagcagccacuacaccaaccccaccgugagaagauacgccguggccagacugagacaggccgacgacgaggaccugcugauguaccugcugcagcuggugcaggcccugaaguacgagaacuucgacgacaucaagaacggccuggagcccaccaagaaggacagccagagcagcgugagcgagaacgugagcaacagcggcaucaacagcgccgagaucgacagcagccagaucaucaccagcccccugcccagcgugagcagccccccccccgccagcaagaccaaggaggugcccgacggcgagaaccuggagcaggaccugugcaccuuccugaucagcagagccugcaagaacagcacccuggccaacuaccuguacugguacgugaucguggagugcgaggaccaggacacccagcagagagaccccaagacccacgagauguaccugaacgugaugagaagauucagccaggcccugcugaagggcgacaagagcgugagagugaugagaagccugcuggccgcccagcagaccuucguggacagacuggugcaccugaugaaggccgugcagagagagagcggcaacagaaagaagaagaacgagagacugcaggcccugcugggcgacaacgagaagaugaaccugagcgacguggagcugaucccccugccccuggagccccaggugaagaucagaggcaucauccccgagaccgccacccuguucaagagcgcccugaugcccgcccagcuguucuucaagaccgaggacggcggcaaguaccccgugaucuucaagcacggcgacgaccugagacaggaccagcugauccugcagaucaucagccugauggacaagcugcugagaaaggagaaccuggaccugaagcugacccccuacaaggugcuggccaccagcaccaagcacggcuucaugcaguucauccagagcgugcccguggccgaggugcuggacaccgagggcagcauccagaacuucuucagaaaguacgcccccagcgagaacggccccaacggcaucagcgccgaggugauggacaccuacgugaagagcugcgccggcuacugcgugaucaccuacauccugggcgugggcgacagacaccuggacaaccugcugcugaccaagaccggcaagcuguuccacaucgacuucggcuacauccugggcagagaccccaagccccugcccccccccaugaagcugaacaaggagaugguggagggcaugggcggcacccagagcgagcaguaccaggaguucagaaagcagugcuacaccgccuuccugcaccugagaagauacagcaaccugauccugaaccuguucagccugaugguggacgccaacauccccgacaucgcccuggagcccgacaagaccgugaagaaggugcaggacaaguucagacuggaccugagcgacgaggaggccgugcacuacaugcagagccugaucgacgagagcgugcacgcccuguucgccgccgugguggagcagauccacaaguucgcccaguacuggagaaaguga

SEQ ID NO: 9241 - RNA, 2664 nt, Artificial Sequence
  derived and/or modified sequence opt5 from PI3K__Homo_sapiens__AAH33004
augggcgaggccgaaaaguuccacuacaucuauagcugcgaccuggauauuaacgugcagcucaaaaucgggucccuggagggaaagagagaacaaaaaucuuacaaggcuguccuugaggaccccaugcugaaauuuagcggccucuaucaggaaaccuguuccgaucuguacguuacaugccagguguucgccgaggggaagccucuugcgcugccggugcggacgucuuauaaggcuuuuagcacccgcuggaauuggaacgaguggcucaaacugcccgucaaguacccugaccugcccagaaaugcccagguggcccucacaauuugggauguuuauggaccuggcaaagcugugcccgucgggggaaccacagugucccuguucggcaaguacggcauguuucggcaagggaugcaugaccuuaaaguuuggccuaacguggaagccgauggaucugagccgaccaagacacccggccgcaccagcuccacgcugagcgaagaccagaugucuagacucgcuaagcugaccaaagcccaccggcaggggcauauggucaagguggauuggcuugaccgccugacauucagagagaucgagaugauuaaugaauccgagaaacggagcucuaacuuuauguaccucaugguggaguuccgcugugucaagugcgaugacaaagaguauggaaucguuuacuaugaaaaggauggcgacgaguccagcccuauccugaccucuuuugagcuggugaaagugcccgacccucagauguccauggaaaaucucgucgagagcaagcaccauaagcuggcgagaucccuucggucugggcccagcgaucacgaccugaaaccgaacgccgcuacacgcgaucaacucaauauuaucguguccuacccucccaccaagcagcugacguaugaagaacaggaccuuguuuggaaauucagauacuaucugacaaaccaggaaaaggcccucaccaaauuucugaagugugugaauugggaucugccucaagaggcuaagcaggcccucgagcugcuuggaaaauggaagcccauggacgucgaagauagccuggagcuccugucuucccacuacacaaaccccaccgugcggcgcuacgcgguugccagacuucggcaggcugacgaugaagaccugcucauguaucugcugcaacucgugcaggcccugaaauacgagaauuucgaugacauuaagaacggccuugaaccuaccaaaaaggacagccagucuagcgucuccgagaaugugucuaacagcggcaucaacuccgcugagauugauagcucucagaucauuacauccccgcugcccagcgucucuuccccucccccugccagcaagacgaaagaagugcccgacggggagaaucucgaacaagaucugugcaccuuucugaucuccagagccuguaagaacucuacacuugcuaauuaucucuacugguauguuaucguggagugcgaggaccaggauacccagcagcgcgacccgaaaacacaugaaauguaccugaacgucaugcggagauucagccaagcgcugcucaagggagauaaauccgugcgcguuaugcggucucugcuugccgcucagcagaccuucguggacagacugguccaccucaugaaggccgugcagcgcgagagcggcaaucggaagaaaaagaacgaaagacugcaagcccugcuuggggauaaugagaaaaugaaccucuccgacguggaacugauuccucugccccucgagccucagguuaagauccgcggaauuauccccgagacggcuacacuguuuaaaagcgcccuuaugccugcgcagcuguucuuuaagaccgaagauggcgggaaauaucccgucauuuucaagcauggagacgaucuccggcaggaccaacugauccugcagaucauuucucuuauggacaagcuccugagaaaagagaaucuggaucucaagcugaccccguacaaagugcuugcuacauccaccaagcacggcuuuaugcaguucauccaaagcgugccugucgccgaagugcuggacacagagggcucuauucagaacuuuuuccgcaaauacgcccccuccgaaaaugggcccaacggaaucagcgcugagguuauggauacguaugugaagucuugugccggcuacugcgucauuaccuauauccucggggugggagaccggcaccuggauaaucugcuucucacaaagaccggcaaacuguuucauaucgacuucggguacauucugggcagagauccuaagccgcugcccccucccaugaaacugaacaaggagaugguugaaggaaugggcgggacacagagcgagcaguaucaagaauuucggaaacaguguuacaccgcuuuccuucaccuccgcagauauuccaaucucauccugaaccuguuuagccuuaugguggacgccaacauuccugauaucgcgcuggagcccgacaagacggucaagaaagugcaggauaaguuccggcucgaccugucugaugaagaggccguucauuacaugcagucccucauugacgagagcgugcacgcucuguucgccgcugucguggaacaaauccauaaauuugcccaguacuggagaaaguga

SEQ ID NO: 9242 - protein, 880 aa, Artificial Sequence
  PI3K__Homo_sapiens__Q8WYR1
MQPGATTCTEDRIQHALERCLHGLSLSRRSTSWSAGLCLNCWSLQELVSRDPGHFLILLEQILQKTREVQEKGTYDLLTPLALLFYSTVLCTPHFPPDSDLLLKAASTYHRFLTWPVPYCSICQELLTFIDAELKAPGISYQRLVRAEQGLPIRSHRSSTVTVLLLNPVEVQAEFLAVANKLSTPGHSPHSAYTTLLLHAFQATFGAHCDVPGLHCRLQAKTLAELEDIFTETAEAQELASGIGDAAEARRWLRTKLQAVGEKAGFPGVLDTAKPGKLHTIPIPVARCYTYSWSQDSFDILQEILLKEQELLQPGILGDDEEEEEEEEEVEEDLETDGHCAERDSLLSTSSLASHDSTLSLASSQASGPALSRHLLTSFVSGLSDGMDSGYVEDSEESSSEWPWRRGSQERRGHRRPGQKFIRIYKLFKSTSQLVLRRDSRSLEGSSDTALPLRRAGSLCSPLDEPVSPPSRAQRSRSLPQPKLGTQLPSWLLAPASRPQRRRPFLSGDEDPKASTLRVVVFGSDRISGKVARAYSNLRRLENNRPLLTRFFKLQFFYVPVKRSHGTSPGACPPPRSQTPSPPTDSPRHASPGELGTTPWEESTNDISHYLGMLDPWYERNVLGLMHLPPEVLCQQSLKAEAQALEGSPTQLPILADMLLYYCRFAARPVLLQVYQTELTFITGEKTTEIFIHSLELGHSAATRAIKASGPGSKRLGIDGDREAVPLTLQIIYSKGAISGRSRWSNLEKVCTSVNLNKACRKQEELDSSMEALTLNLTEVVKRQNSKSKKGFNQISTSQIKVDKVQIIGSNSCPFAVCLDQDERKILQSVVRCEVSPCYKPEKSDLSSPPQTPPDLPAQAAPDLCSLLCLPIMTFSGALP

SEQ ID NO: 9243 - RNA, 2643 nt, Artificial Sequence
  PI3K__Homo_sapiens__ABY87553
augcagccaggggccacgacaugcacggaggaccgcauccagcaugcccuggaacgcugccugcauggacucagccucagccgccgcuccaccuccuggucagcugggcugugucugaacugcuggagccugcaggagcuggucagcagggacccgggccacuuccuuauccuccuugagcagauccugcagaagacccgagagguccaggagaagggcaccuacgaccugcucaccccgcuggcccugcucuucuauuccacuguucuuuguacaccacacuucccaccagacucggaucuccuucugaaggcagccagcaccuaccaccgguuccugaccuggccuguuccuuacugcagcaucugccaggagcugcucaccuucauugaugcugaacucaaggccccagggaucuccuaccagagacuggugagggcugagcagggccugcccaucaggagucaccgcagcuccaccgucaccgugcugcugcugaacccaguggaagugcaggccgaguuccuugcuguagccaauaagcugaguacgcccggacacucgccucacagugccuacaccacccugcuccugcacgccuuccaggccaccuuuggggcccacugugacgucccgggccugcacugcaggcuacaggccaagacccuggcagagcuugaggacaucuucacggagaccgcagaggcacaggagcuggcaucuggcaucggggaugcugcagaggcccggcgguggcucaggaccaagcugcaggcggugggagaaaaagcuggcuucccugggguguuagacacugcaaaaccagggaagcuccauaccauccccaucccugucgccaggugcuacaccuacagcuggagccaggacagcuuugacauccugcaggaaauccugcucaaggaacaggagcuacuccagccagggauccugggagaugaugaagaggaggaagaggaggaggaggagguggaggaggacuuggaaacugacgggcacugugccgagagagauucccugcucuccaccagcucuuuggcgucccaugacuccacccugucccuugcauccucccaggccucggggccggcccucucgcgccaucugcugacuuccuuugucucaggccucucugauggcauggacagcggcuacguggaggacagcgaggagagcuccuccgaguggccuuggaggcguggcagccaggaacgccgaggccaccgcaggccugggcagaaguucaucaggaucuauaaacucuucaagagcaccagccagcugguacugcggagggacucucggagccuggagggcagcucggacacggcccugccccugaggcgggcagggagccucugcagcccccuggacgaaccaguaucacccccuucccgggcccagcgcucccgcucccugccccagcccaaacucgguacccagcugcccagcuggcuucuggccccugcuucacgcccccagcgccgccgccccuuccugaguggagaugaggaucccaaggcuuccacgcuacguguuguggucuuuggcuccgaucggauuucagggaagguggcucgggcguacagcaaccuucggcggcuggagaacaaucgcccacuccucacacgguucuucaaacuucaguucuucuacgugccugugaagcgaagucaugggaccagcccuggugccuguccacccccucggagccagacgcccucacccccgacagacuccccuaggcacgccagcccuggagagcugggcaccaccccaugggaggagagcaccaaugacaucucccacuaccucggcaugcuggaccccugguaugagcgcaauguacugggccucaugcaccugcccccugaaguccugugccagcagucccugaaggcugaagcccaggcccuggagggcuccccaacccagcugcccauccuggcugacaugcuacucuacuacugccgcuuugccgccagaccggugcugcugcaagucuaucagaccgagcugaccuucaucacuggggagaagacgacagagaucuucauccacuccuuggagcugggucacuccgcugccacacgugccaucaaggcgucagguccuggcagcaagcggcugggcaucgauggcgaccgggaggcuguuccucuaacacuacagauuauuuacagcaagggggccaucaguggacgaagucgcuggagcaaccuggagaaggucuguaccuccgugaaccucaacaaggccugccggaagcaggaggagcuggauuccagcauggaggcccugacgcuaaaccugacagaaguggugaaaaggcagaacuccaaauccaagaagggcuuuaaccagauuagcacaucgcagaucaaaguggacaaggugcagaucaucggcuccaacagcugccccuuugcugugugccuggaccaggaugagagaaagauccugcagaguguagucagaugugaggucucaccgugcuacaagccagagaagagcgaccucuccucaccaccccagacgccuccugaccugccggcccaggccgcaccugaucucugcucccuucucugccugcccaucaugacuuucaguggagcucugcccuag

SEQ ID NO: 9244 - RNA, 2643 nt, Artificial Sequence
  derived and/or modified sequence opt1 from PI3K__Homo_sapiens__ABY87553
augcagcccggcgccacgaccugcacggaggaccgcauccagcacgcccuggagcggugccuccacgggcugagccugucccgccggagcaccuccuggagcgcgggccucugccugaacugcuggucccugcaggagcucgugagccgcgacccggggcacuuccugauccugcucgagcagauccugcagaagacccgggagguccaggagaagggcaccuacgaccugcucacgccccuggcccuccucuucuacuccaccgugcugugcacgccccacuucccgcccgacagcgaccugcuccugaaggccgccuccaccuaccaccgcuuccugaccuggcccgugcccuacugcagcaucugccaggagcuccugaccuucaucgacgccgagcugaaggcgcccgggaucuccuaccagcggcucguccgcgccgagcagggccugccgauccggagccaccgcuccagcaccgugaccgugcugcuccugaaccccgucgaggugcaggccgaguuccuggccguggcgaacaagcucuccacgcccggccacagcccccacuccgccuacaccacccugcugcuccacgccuuccaggccaccuucggggcccacugcgacgucccgggccugcacugccggcugcaggcgaagacgcucgccgagcuggaggacaucuucaccgagaccgccgaggcccaggagcuggccagcgggaucggcgacgcggccgaggcccgccgguggcuccgcaccaagcugcaggccgugggggagaaggccggcuuccccggcgugcuggacacggcgaagcccgggaagcuccacaccauccccaucccggucgcccggugcuacaccuacuccuggagccaggacagcuucgacauccugcaggagauccugcugaaggagcaggagcugcugcagcccggcauccucggggacgacgaggaggaggaggaggaggaggaggagguggaggaggaccuggagaccgacggccacugcgccgagcgcgacucccugcugagcaccuccagccucgccucccacgacagcacccugucccuggccagcucccaggcgagcggccccgcccucucccggcaccuccugaccagcuucguguccgggcugagcgacggcauggacuccggguacgucgaggacagcgaggaguccagcuccgaguggcccuggcgccggggcagccaggagcgccgggggcaccgccgcccgggccagaaguucauccggaucuacaagcuguucaagagcaccucccagcuggugcuccgccgggacagccgcucccuggagggcagcuccgacacggcccugccccuccggcgcgccgggagccugugcagcccccuggacgagcccguguccccgcccucccgggcgcagcgcagccggucccucccccagcccaagcugggcacccagcugccgagcuggcuccuggcccccgccucccgcccccagcggcgccggccguuccugagcggggacgaggaccccaaggccuccacccuccgcgucgugguguucggcagcgaccggaucuccgggaaggucgcccgcgcguacagcaaccugcggcgccuggagaacaaccggccccuccugacccgcuucuucaagcugcaguucuucuacgugcccgugaagcgcagccacggcacguccccgggcgccugcccgccgccccggagccagacccccuccccgcccaccgacagcccccgccacgccucccccggggagcucggcaccacgcccugggaggagagcaccaacgacaucucccacuaccuggggaugcuggaccccugguacgagcggaacguccucggccugaugcaccucccgcccgaggugcugugccagcagagccugaaggccgaggcccaggcgcuggaggggucccccacccagcuccccauccuggccgacaugcugcucuacuacugccgcuucgccgcccggcccguccugcuccagguguaccagaccgagcugaccuucaucacgggcgagaagaccaccgagaucuucauccacagccuggagcugggccacuccgccgcgacccgcgccaucaaggccagcgggcccggcuccaagcggcucgggaucgacggcgaccgcgaggccgugccccugacgcugcagaucaucuacagcaagggcgcgaucuccgggcggagccgcugguccaaccucgagaaggucugcaccagcgugaaccugaacaaggccugccggaagcaggaggagcuggacuccagcauggaggcccucacccugaaccugaccgagguggucaagcgccagaacagcaaguccaagaagggcuucaaccagaucagcacgucccagaucaagguggacaaggugcagaucaucgggagcaacuccugccccuucgccgucugccucgaccaggacgagcggaagauccugcagagcguggugcgcugcgaggucucccccugcuacaagccggagaaguccgaccugagcagcccgccccagaccccgcccgaccuccccgcccaggcggcccccgaccugugcucccugcucugccugcccaucaugaccuucagcggcgcccugcccuga

SEQ ID NO: 9245 - RNA, 2643 nt, Artificial Sequence
  derived and/or modified sequence opt2 from PI3K__Homo_sapiens__ABY87553
augcagcccggcgccaccaccugcaccgaggaccgcauccagcacgcccucgagcgcugccuccacggccucucccucucccgccgcuccaccuccugguccgccggccucugccucaacugcuggucccuccaggagcucgucucccgcgaccccggccacuuccucauccuccucgagcagauccuccagaagacccgcgagguccaggagaagggcaccuacgaccuccucaccccccucgcccuccucuucuacuccaccguccucugcaccccccacuucccccccgacuccgaccuccuccucaaggccgccuccaccuaccaccgcuuccucaccuggcccguccccuacugcuccaucugccaggagcuccucaccuucaucgacgccgagcucaaggcccccggcaucuccuaccagcgccucguccgcgccgagcagggccuccccauccgcucccaccgcuccuccaccgucaccguccuccuccucaaccccgucgagguccaggccgaguuccucgccgucgccaacaagcucuccacccccggccacuccccccacuccgccuacaccacccuccuccuccacgccuuccaggccaccuucggcgcccacugcgacguccccggccuccacugccgccuccaggccaagacccucgccgagcucgaggacaucuucaccgagaccgccgaggcccaggagcucgccuccggcaucggcgacgccgccgaggcccgccgcuggcuccgcaccaagcuccaggccgucggcgagaaggccggcuuccccggcguccucgacaccgccaagcccggcaagcuccacaccauccccauccccgucgcccgcugcuacaccuacuccuggucccaggacuccuucgacauccuccaggagauccuccucaaggagcaggagcuccuccagcccggcauccucggcgacgacgaggaggaggaggaggaggaggaggaggucgaggaggaccucgagaccgacggccacugcgccgagcgcgacucccuccucuccaccuccucccucgccucccacgacuccacccucucccucgccuccucccaggccuccggccccgcccucucccgccaccuccucaccuccuucgucuccggccucuccgacggcauggacuccggcuacgucgaggacuccgaggaguccuccuccgaguggcccuggcgccgcggcucccaggagcgccgcggccaccgccgccccggccagaaguucauccgcaucuacaagcucuucaaguccaccucccagcucguccuccgccgcgacucccgcucccucgagggcuccuccgacaccgcccucccccuccgccgcgccggcucccucugcuccccccucgacgagcccgucuccccccccucccgcgcccagcgcucccgcucccucccccagcccaagcucggcacccagcuccccuccuggcuccucgcccccgccucccgcccccagcgccgccgccccuuccucuccggcgacgaggaccccaaggccuccacccuccgcgucgucgucuucggcuccgaccgcaucuccggcaaggucgcccgcgccuacuccaaccuccgccgccucgagaacaaccgcccccuccucacccgcuucuucaagcuccaguucuucuacguccccgucaagcgcucccacggcaccucccccggcgccugcccccccccccgcucccagacccccuccccccccaccgacuccccccgccacgccucccccggcgagcucggcaccacccccugggaggaguccaccaacgacaucucccacuaccucggcaugcucgaccccugguacgagcgcaacguccucggccucaugcaccucccccccgagguccucugccagcagucccucaaggccgaggcccaggcccucgagggcucccccacccagcuccccauccucgccgacaugcuccucuacuacugccgcuucgccgcccgccccguccuccuccaggucuaccagaccgagcucaccuucaucaccggcgagaagaccaccgagaucuucauccacucccucgagcucggccacuccgccgccacccgcgccaucaaggccuccggccccggcuccaagcgccucggcaucgacggcgaccgcgaggccgucccccucacccuccagaucaucuacuccaagggcgccaucuccggccgcucccgcugguccaaccucgagaaggucugcaccuccgucaaccucaacaaggccugccgcaagcaggaggagcucgacuccuccauggaggcccucacccucaaccucaccgaggucgucaagcgccagaacuccaaguccaagaagggcuucaaccagaucuccaccucccagaucaaggucgacaagguccagaucaucggcuccaacuccugccccuucgccgucugccucgaccaggacgagcgcaagauccuccaguccgucguccgcugcgaggucucccccugcuacaagcccgagaaguccgaccucuccucccccccccagaccccccccgaccuccccgcccaggccgcccccgaccucugcucccuccucugccuccccaucaugaccuucuccggcgcccuccccuga

SEQ ID NO: 9246 - RNA, 2643 nt, Artificial Sequence
  derived and/or modified sequence opt3 from PI3K__Homo_sapiens__ABY87553
augcagcccggcgccaccacaugcacugaggacagaauccaacacgcucuggaaaggugucuccaugggcuuagccugucccggcgcucuacgucauggagugcaggauugugcuuaaacuguuggagccugcaggagcuagugucccgagauccuggucacuuccucauucugcuugaacagauacugcagaagacccgugagguccaagaaaaaggcacauacgacuugcucacuccacuggcccugcucuuuuauucuaccguuuuaugcacaccgcauuuucccccugauucggaccugcuuuugaaggcggcuucaaccuaccacagauuucugacuuggccagugcccuauuguagcaucugccaggagcuacucacauucauugaugccgagcugaaagcaccugggaucaguuaccagaggcuuguacgggccgaacagggacugccaauucgcucccauagaucuagcaccgugacggucuugcuccugaaucccguggagguucaagcugaauuuuuagcaguggccaacaagcuguccacuccuggccacucaccacacagugcuuauaccacacuccuucugcaugccuuccaggcgacuuuuggugcacacugugacgucccgggguugcauugcaggcuacaggccaaaacccuggcugagcucgaggauaucuucacagaaaccgccgaggcacaggaacuggcuagcggaauaggcgacgccgcggaggcccggcgcuggcuucgaacgaagcugcaagcagugggcgaaaaggcuggguuucccggaguauuggauacugccaaaccugguaagcuccacacaaucccaauucccguugcuagauguuacaccuauucuuggucccaggacucauucgauauccugcaggagauuuuacugaaagagcaagaacuacuccagccuggcauccugggggacgaugaggaagaggaagaggaggaagaggaaguggaggaagaccuugagacugacggacacugcgccgagagggauagcuugcugaguacaucuucccucgcaagccaugacucgacccugucucuugccuccucacaggcuaguggcccagcgcugagccggcacuugcucacguccuuugucucuggucugagcgaugggauggacucaggauacguggaagauagugaggaauccagcucugaguggcccuggcgucgcggcucacaggagagaaggggccaucggcgaccggggcaaaaguucauacgcauuuacaaauuauuuaagaguaccagccagcuggugcuaagaagggacucccggucucucgaaggaucgagcgauacagcacugccucuucgcagagccgguuccuuguguucaccccuggacgagccagucaguccucccucuagggcucagcguagccggucccucccacagcccaagcugggcacucaauuaccuucauggcugcuugccccagcaagccgaccgcagagaaggcgccccuucuugucuggggaugaagacccuaaagccuccacccuccggguugugguauucggaagugauagaaucagcggcaagguggcuagggccuauucuaaucugcgccgacuagagaacaaucggccacugcucacacguuucuucaaacugcaguuuuucuacguccccgugaagagaucccacgguacuucaccuggggcaugcccacccccgaggagucagaccccuagcccacccacagacucgccucgccaugcgucccccggcgaacuuggaaccacuccaugggaggagucuacgaacgacauuagccacuauuugggcaugcuggauccuugguacgaacggaauguuuuagggcucaugcaucugcccccagaggugcuuugccaacagucacugaaagcugaagcccaggcauuggagggaaguccgacacagcucccuauccuggccgacaugcuacuguauuacuguagauuugcugccaggcccguccuccugcaaguguaucagaccgaacuuacuuucaucaccggugagaagacaaccgagauuuuuauacacuccuuggaacugggccacucugcagcuacucgagccaucaaagcgagcgggccaggauccaagcgcuuaggcauugauggugaccgggaggccguaccccucacacugcagaucauauacucaaagggggcuauuagcggcagaaguagguggucuaaccuugaaaaaguuugcacguccgugaaucugaacaaggcaugucguaaacaagaggaacuagauagcucgauggaggcccucacccugaauuugacugaggucgugaagcgccagaacucaaaaucuaagaagggauucaaucagaucaguacaucccagaucaaagucgacaaggugcaaauuaucggcagcaacucuugcccuuuugcuguuugucuggaucaggacgaacggaaaauuuuacagagcgugguaagaugcgaggucuccccauguuacaagcccgaaaaaucagaucucaguagcccuccgcagaccccacccgaccugccugcccaagcagcgccagaucuuugcucucuguugugucuccccauaaugacauucuccggggcccugccuuga

SEQ ID NO: 9247 - RNA, 2643 nt, Artificial Sequence
  derived and/or modified sequence opt4 from PI3K__Homo_sapiens__ABY87553
augcagcccggcgccaccaccugcaccgaggacagaauccagcacgcccuggagagaugccugcacggccugagccugagcagaagaagcaccagcuggagcgccggccugugccugaacugcuggagccugcaggagcuggugagcagagaccccggccacuuccugauccugcuggagcagauccugcagaagaccagagaggugcaggagaagggcaccuacgaccugcugaccccccuggcccugcuguucuacagcaccgugcugugcaccccccacuucccccccgacagcgaccugcugcugaaggccgccagcaccuaccacagauuccugaccuggcccgugcccuacugcagcaucugccaggagcugcugaccuucaucgacgccgagcugaaggcccccggcaucagcuaccagagacuggugagagccgagcagggccugcccaucagaagccacagaagcagcaccgugaccgugcugcugcugaaccccguggaggugcaggccgaguuccuggccguggccaacaagcugagcacccccggccacagcccccacagcgccuacaccacccugcugcugcacgccuuccaggccaccuucggcgcccacugcgacgugcccggccugcacugcagacugcaggccaagacccuggccgagcuggaggacaucuucaccgagaccgccgaggcccaggagcuggccagcggcaucggcgacgccgccgaggccagaagauggcugagaaccaagcugcaggccgugggcgagaaggccggcuuccccggcgugcuggacaccgccaagcccggcaagcugcacaccauccccauccccguggccagaugcuacaccuacagcuggagccaggacagcuucgacauccugcaggagauccugcugaaggagcaggagcugcugcagcccggcauccugggcgacgacgaggaggaggaggaggaggaggaggagguggaggaggaccuggagaccgacggccacugcgccgagagagacagccugcugagcaccagcagccuggccagccacgacagcacccugagccuggccagcagccaggccagcggccccgcccugagcagacaccugcugaccagcuucgugagcggccugagcgacggcauggacagcggcuacguggaggacagcgaggagagcagcagcgaguggcccuggagaagaggcagccaggagagaagaggccacagaagacccggccagaaguucaucagaaucuacaagcuguucaagagcaccagccagcuggugcugagaagagacagcagaagccuggagggcagcagcgacaccgcccugccccugagaagagccggcagccugugcagcccccuggacgagcccgugagcccccccagcagagcccagagaagcagaagccugccccagcccaagcugggcacccagcugcccagcuggcugcuggcccccgccagcagaccccagagaagaagacccuuccugagcggcgacgaggaccccaaggccagcacccugagaguggugguguucggcagcgacagaaucagcggcaagguggccagagccuacagcaaccugagaagacuggagaacaacagaccccugcugaccagauucuucaagcugcaguucuucuacgugcccgugaagagaagccacggcaccagccccggcgccugccccccccccagaagccagacccccagcccccccaccgacagccccagacacgccagccccggcgagcugggcaccacccccugggaggagagcaccaacgacaucagccacuaccugggcaugcuggaccccugguacgagagaaacgugcugggccugaugcaccugccccccgaggugcugugccagcagagccugaaggccgaggcccaggcccuggagggcagccccacccagcugcccauccuggccgacaugcugcuguacuacugcagauucgccgccagacccgugcugcugcagguguaccagaccgagcugaccuucaucaccggcgagaagaccaccgagaucuucauccacagccuggagcugggccacagcgccgccaccagagccaucaaggccagcggccccggcagcaagagacugggcaucgacggcgacagagaggccgugccccugacccugcagaucaucuacagcaagggcgccaucagcggcagaagcagauggagcaaccuggagaaggugugcaccagcgugaaccugaacaaggccugcagaaagcaggaggagcuggacagcagcauggaggcccugacccugaaccugaccgagguggugaagagacagaacagcaagagcaagaagggcuucaaccagaucagcaccagccagaucaagguggacaaggugcagaucaucggcagcaacagcugccccuucgccgugugccuggaccaggacgagagaaagauccugcagagcguggugagaugcgaggugagccccugcuacaagcccgagaagagcgaccugagcagccccccccagaccccccccgaccugcccgcccaggccgcccccgaccugugcagccugcugugccugcccaucaugaccuucagcggcgcccugcccuga

SEQ ID NO: 9248 - RNA, 2643 nt, Artificial Sequence
  derived and/or modified sequence opt5 from PI3K__Homo_sapiens__ABY87553
augcagcccggcgccaccacaugcacggaggacagaauccaacacgcucuggaacggugucuccaugggcugagccuuucccgcagaucuaccagcugguccgccggacugugccucaacuguuggucucugcaggagcuugugagccgggauccuggccacuuccugauucuccuggaacagauccugcagaagacacgcgagguccaagaaaaagggaccuacgaccuccugacaccgcuugcgcugcucuuuuauuccaccguucugugcacaccccauuucccucccgauucugaccuucugcucaaggcugccagcaccuaccacagauuucugacguggccugugcccuauuguuccauuugccaggagcugcucaccuucaucgaugccgagcugaaagcuccuggaauuagcuaccagcggcuugugcgcgccgaacagggccugccgaucagaucucaucgguccagcacagucaccgugcuccugcuuaaucccguugaggugcaagcugaauuucuggccgucgcgaacaagcucucuacaccugggcacagcccccacagcgccuauaccacgcugcugcuccaugcuuuccaggccacauuuggagcucacugugacgugccuggccugcauugccgccuucaggccaaaacccuggcggagcucgaggauaucuucacagaaaccgccgaggcucaggaacuggccucuggcauuggggacgcugccgaggccagacgguggcuucgcaccaagcugcaagcuguuggagaaaaggcgggcuuucccggggugcucgauacagccaaaccgggaaagcugcacacgaucccuauucccgucgcuagauguuacaccuauuccuggagccaggacuccuucgauauccugcaggagauucuccugaaagagcaagaacuucugcagccuggcauccucggggacgaugaggaagaggaagaggaggaagaggaaguggaggaagaccuggagacagacggacacugcgccgagcgggauucucugcuuagcaccuccagccucgccucucaugacuccacacugagccuggcuucuagccaggccuccggccccgcgcucucucgccaucugcuuaccagcuuuguguccggccugagcgaugggauggacucuggauacgucgaagauuccgaggaauccucuuccgaguggcccuggagacggggcagccaggagagacgcgggcaccggagaccuggacaaaaguucauucgcaucuacaaacucuuuaaguccacgucucagcugguucugcggagagacagccgcucccuugaaggcucuagcgauacagcucucccgcugcggagagccgggucccuguguagcccccucgacgagccugugucucccccuucccgcgcccagcggagcagaucucugccccagccgaaacuuggaacccaacugccuuccuggcuccuggcucccgccagccgcccucagcggagacggcccuuccugucuggcgaugaagacccuaaggcuagcacccuucgcguggucguguucggcuccgauagaaucagcgggaagguugcccgggcguauucuaaucucagacgccuggagaacaaucggccccugcucacaagauuuuucaaacugcaguuuuucuacgugccggucaagcgcucccacggaaccagcccuggcgccugcccuccgcccagaucccagacacccucucccccuacggacagcccccggcaugcuuccccuggggaacuuggaaccacacccugggaggagucuaccaacgacauuagccacuaucugggcaugcucgauccuugguacgaacgcaaugugcuggggcugaugcaccuucccccggagguucucugccaacagucccugaaagccgaagcucaggcccuggagggcucuccuacacagcuccccauccuggcggacaugcuucuguauuacuguagauuugccgcucggccugugcuccugcaagucuaucagaccgaacugacguucauuaccggagagaagacaaccgagaucuuuauucauagccuugaacugggccacuccgccgcuacacgcgccaucaaagccagcgggcccggaucuaagagacucggcaucgauggggaccgggaggcugugccgcugacccuccagauuaucuacuccaagggagcgauuagcggccgcucuagaugguccaaccuggaaaaagucugcacgagcgugaaucuuaacaaggccugucggaaacaagaggaacuggauucuuccauggaggcucucacacugaaucugaccgagguugugaagcgccagaacagcaaauccaagaagggguucaaucagaucagcacaucucagauuaaagucgacaaggugcaaaucaucggcagcaacuccugcccuuuugccguuugucuugaucaggacgaaagaaaaauucugcagucugugguccggugcgaggugagccccuguuacaagccugaaaaauccgaucucucuagcccuccccagaccccgcccgaccugcccgcccaagcugccccugaucucugcucccugcuuugucugcccaucaugaccuucucuggagcgcucccuuga

SEQ ID NO: 9249 - protein, 968 aa, Artificial Sequence
  PKD2__Homo_sapiens__Q13563
MVNSSRVQPQQPGDAKRPPAPRAPDPGRLMAGCAAVGASLAAPGGLCEQRGLEIEMQRIRQAAARDPPAGAAASPSPPLSSCSRQAWSRDNPGFEAEEEEEEVEGEEGGMVVEMDVEWRPGSRRSAASSAVSSVGARSRGLGGYHGAGHPSGRRRRREDQGPPCPSPVGGGDPLHRHLPLEGQPPRVAWAERLVRGLRGLWGTRLMEESSTNREKYLKSVLRELVTYLLFLIVLCILTYGMMSSNVYYYTRMMSQLFLDTPVSKTEKTNFKTLSSMEDFWKFTEGSLLDGLYWKMQPSNQTEADNRSFIFYENLLLGVPRIRQLRVRNGSCSIPQDLRDEIKECYDVYSVSSEDRAPFGPRNGTAWIYTSEKDLNGSSHWGIIATYSGAGYYLDLSRTREETAAQVASLKKNVWLDRGTRATFIDFSVYNANINLFCVVRLLVEFPATGGVIPSWQFQPLKLIRYVTTFDFFLAACEIIFCFFIFYYVVEEILEIRIHKLHYFRSFWNCLDVVIVVLSVVAIGINIYRTSNVEVLLQFLEDQNTFPNFEHLAYWQIQFNNIAAVTVFFVWIKLFKFINFNRTMSQLSTTMSRCAKDLFGFAIMFFIIFLAYAQLAYLVFGTQVDDFSTFQECIFTQFRIILGDINFAEIEEANRVLGPIYFTTFVFFMFFILLNMFLAIINDTYSEVKSDLAQQKAEMELSDLIRKGYHKALVKLKLKKNTVDDISESLRQGGGKLNFDELRQDLKGKGHTDAEIEAIFTKYDQDGDQELTEHEHQQMRDDLEKEREDLDLDHSSLPRPMSSRSFPRSLDDSEEDDDEDSGHSSRRRGSISSGVSYEEFQVLVRRVDRMEHSIGSIVSKIDAVIVKLEIMERAKLKRREVLGRLLDGVAEDERLGRDSEIHREQMERLVREELERWESDDAASQISHGLGTPVGLNGQPRPRSSRPSSSQSTEGMEGAGGNGSSNVHV

SEQ ID NO: 9250 - RNA, 2907 nt, Artificial Sequence
  PKD2__Homo_sapiens__AAC50520
auggugaacuccagucgcgugcagccucagcagcccggggacgccaagcggccgcccgcgccccgcgcgccggacccgggccggcugauggcuggcugcgcggccgugggcgccagccucgccgccccgggcggccucugcgagcagcggggccuggagaucgagaugcagcgcauccggcaggcggccgcgcgggaccccccggccggagccgcggccuccccuucuccuccgcucucgucgugcucccggcaggcguggagccgcgauaaccccggcuucgaggccgaggaggaggaggaggagguggaaggggaagaaggcggaauggugguggagauggacguagaguggcgcccgggcagccggaggucggccgccuccucggccgugagcuccgugggcgcgcggagccgggggcuugggggcuaccacggcgcgggccacccgagcgggaggcggcgccggcgagaggaccagggcccgccgugccccagcccagucggcggcggggacccgcugcaucgccaccucccccuggaagggcagccgccccgaguggccugggcggagaggcugguucgcgggcugcgaggucucuggggaacaagacucauggaggaaagcagcacuaaccgagagaaauaccuuaaaaguguuuuacgggaacuggucacauaccuccuuuuucucauagucuugugcaucuugaccuacggcaugaugagcuccaauguguacuacuacacccggaugaugucacagcucuuccuagacacccccguguccaaaacggagaaaacuaacuuuaaaacucugucuuccauggaagacuucuggaaguucacagaaggcuccuuauuggaugggcuguacuggaagaugcagcccagcaaccagacugaagcugacaaccgaaguuucaucuucuaugagaaccugcuguuagggguuccacgaauacggcaacuccgagucagaaauggauccugcucuaucccccaggacuugagagaugaaauuaaagagugcuaugaugucuacucugucaguagugaagauagggcucccuuugggccccgaaauggaaccgcuuggaucuacacaagugaaaaagacuugaaugguaguagccacuggggaaucauugcaacuuauaguggagcuggcuauuaucuggauuugucaagaacaagagaggaaacagcugcacaaguugcuagccucaagaaaaaugucuggcuggaccgaggaaccagggcaacuuuuauugacuucucaguguacaacgccaacauuaaccuguucuguguggucagguuauugguugaauucccagcaacagguggugugauuccaucuuggcaauuucagccuuuaaagcugauccgauaugucacaacuuuugauuucuuccuggcagccugugagauuaucuuuuguuucuuuaucuuuuacuaugugguggaagagauauuggaaauucgcauucacaaacuacacuauuucaggaguuucuggaauugucuggauguugugaucguugugcugucagugguagcuauaggaauuaacauauacagaacaucaaauguggaggugcuacuacaguuucuggaagaucaaaauacuuuccccaacuuugagcaucuggcauauuggcagauacaguucaacaauauagcugcugucacaguauuuuuugucuggauuaagcucuucaaauucaucaauuuuaacaggaccaugagccagcucucgacaaccaugucucgaugugccaaagaccuguuuggcuuugcuauuauguucuucauuauuuuccuagcguaugcucaguuggcauaccuugucuuuggcacucaggucgaugacuucaguacuuuccaagaguguaucuucacucaauuccguaucauuuugggcgauaucaacuuugcagagauugaggaagcuaaucgaguuuugggaccaauuuauuucacuacauuuguguucuuuauguucuucauucuuuugaauauguuuuuggcuaucaucaaugauacuuacucugaagugaaaucugacuuggcacagcagaaagcugaaauggaacucucagaucuuaucagaaagggcuaccauaaagcuuuggucaaacuaaaacugaaaaaaaauaccguggaugacauuucagagagucugcggcaaggaggaggcaaguuaaacuuugacgaacuucgacaagaucucaaagggaagggccauacugaugcagagauugaggcaauauucacaaaguacgaccaagauggagaccaagaacugaccgaacaugaacaucagcagaugagagacgacuuggagaaagagagggaggaccuggauuuggaucacaguucuuuaccacgucccaugagcagccgaaguuucccucgaagccuggaugacucugaggaggaugacgaugaagauagcggacauagcuccagaaggaggggaagcauuucuaguggcguuucuuacgaagaguuucaaguccuggugagacgaguggaccggauggagcauuccaucggcagcauaguguccaagauugacgccgugaucgugaagcuagagauuauggagcgagccaaacugaagaggagggaggugcugggaaggcuguuggaugggguggccgaggaugaaaggcugggucgugacagugaaauccauagggaacagauggaacggcuaguacgugaagaguuggaacgcugggaauccgaugaugcagcuucccagaucagucaugguuuaggcacgccagugggacuaaauggucaaccucgccccagaagcucccgcccaucuuccucccaaucuacagaaggcauggaaggugcagguggaaaugggaguucuaauguccacguauga

SEQ ID NO: 9251 - RNA, 2907 nt, Artificial Sequence
  derived and/or modified sequence opt1 from PKD2__Homo_sapiens__AAC50520
auggugaacagcucccgcguccagccccagcagccgggcgacgccaagcggccgcccgcgccccgcgcgcccgaccccgggcggcugauggccggcugcgccgccgugggggccagccucgcggcccccggcgggcugugcgagcagcgcggccuggagaucgagaugcagcggauccgccaggccgccgcgcgggacccgcccgccggcgccgccgccucccccagcccgccccuguccagcugcucccgccaggcguggagccgggacaaccccggguucgaggccgaggaggaggaggaggagguggagggcgaggagggcgggauggucguggagauggacguggaguggcgccccgggucccggcgcagcgccgccuccagcgccgucuccagcgugggcgcgcggucccgcggccucgggggcuaccacggggccggccaccccagcggccggcgccggcgccgggaggaccaggggcccccgugccccucccccgugggcgggggcgacccccugcaccgccaccucccgcuggaggggcagccgccccgggucgccugggccgagcgccuggugcgcggccuccggggccugugggggacccgccugauggaggagagcuccaccaaccgggagaaguaccucaagagcgugcugcgcgagcuggucacguaccuccuguuccugaucgugcucugcauccugaccuacggcaugaugagcuccaacguguacuacuacacccggaugaugagccagcuguuccucgacacccccgucuccaagacggagaagaccaacuucaagacccugagcuccauggaggacuucuggaaguucaccgaggggagccugcucgacggccuguacuggaagaugcagcccuccaaccagacggaggccgacaaccgcagcuucaucuucuacgagaaccugcuccugggggugccccggauccgccagcugcgggugcgcaacggcuccugcagcaucccccaggaccuccgggacgagaucaaggagugcuacgacgucuacuccgugagcuccgaggaccgcgcgcccuucggcccgcggaacgggaccgccuggaucuacaccagcgagaaggaccugaacggcuccagccacugggggaucaucgccaccuacuccggcgccggguacuaccuggaccucagccgcacgcgggaggagaccgccgcccagguggccucccugaagaagaacgucuggcuggaccgcggcacccgggccaccuucaucgacuucagcguguacaacgccaacaucaaccucuucugcgugguccgccugcugguggaguuccccgcgacgggcggggucauccccagcuggcaguuccagccgcucaagcugauccgguacgugaccaccuucgacuucuuccuggccgccugcgagaucaucuucugcuucuucaucuucuacuacguggucgaggagauccucgagauccgcauccacaagcugcacuacuuccgcuccuucuggaacugccuggacguggugaucgucgugcucagcguggucgccaucggcaucaacaucuaccggaccuccaacguggaggugcugcugcaguuccucgaggaccagaacacguuccccaacuucgagcaccuggccuacuggcagauccaguucaacaacaucgcggccgucaccguguucuucguguggaucaagcuguucaaguucaucaacuucaaccgcaccaugagccagcuguccaccacgaugagccggugcgccaaggaccucuucggguucgccaucauguucuucaucaucuuccuggccuacgcgcagcuggccuaccucgucuucggcacccagguggacgacuucuccaccuuccaggagugcaucuucacccaguuccgcaucauccugggcgacaucaacuucgccgagaucgaggaggccaaccgggugcuggggcccaucuacuucacgaccuucgucuucuucauguucuucauccuccugaacauguuccuggccaucaucaacgacaccuacagcgaggugaaguccgaccucgcgcagcagaaggccgagauggagcugagcgaccugauccgcaagggcuaccacaaggcccucgugaagcugaagcugaagaagaacaccgucgacgacaucuccgagagccuccggcagggcggcgggaagcugaacuucgacgagcugcgccaggaccucaaggggaagggccacacggacgccgagaucgaggcgaucuucaccaaguacgaccaggacggggaccaggagcugaccgagcacgagcaccagcagaugcgggacgaccuggagaaggagcgcgaggaccucgaccuggaccacuccagccugccccggccgauguccagccgcuccuucccccggagccucgacgacagcgaggaggacgacgacgaggacuccggccacagcucccgccggcgcgggagcaucuccagcggcguguccuacgaggaguuccaggugcugguccggcgcguggaccggauggagcacagcaucggguccaucgugagcaagaucgacgccgucaucgugaagcuggagaucauggagcgcgccaagcucaagcggcgcgaggugcugggccgccugcucgacggcgucgccgaggacgagcggcuggggcgcgacuccgagauccaccgggagcagauggagcgccuggugcgggaggagcucgagcgcugggagagcgacgacgccgcgucccagaucagccacggccuggggacccccgugggccugaacgggcagccccggccgcgcuccagccggcccuccagcucccagagcacggagggcauggagggcgccgggggcaacgggagcuccaacguccacguguga

SEQ ID NO: 9252 - RNA, 2907 nt, Artificial Sequence
  derived and/or modified sequence opt2 from PKD2__Homo_sapiens__AAC50520
auggucaacuccucccgcguccagccccagcagcccggcgacgccaagcgcccccccgccccccgcgcccccgaccccggccgccucauggccggcugcgccgccgucggcgccucccucgccgcccccggcggccucugcgagcagcgcggccucgagaucgagaugcagcgcauccgccaggccgccgcccgcgacccccccgccggcgccgccgccucccccucccccccccucuccuccugcucccgccaggccuggucccgcgacaaccccggcuucgaggccgaggaggaggaggaggaggucgagggcgaggagggcggcauggucgucgagauggacgucgaguggcgccccggcucccgccgcuccgccgccuccuccgccgucuccuccgucggcgcccgcucccgcggccucggcggcuaccacggcgccggccaccccuccggccgccgccgccgccgcgaggaccagggcccccccugccccucccccgucggcggcggcgacccccuccaccgccaccucccccucgagggccagcccccccgcgucgccugggccgagcgccucguccgcggccuccgcggccucuggggcacccgccucauggaggaguccuccaccaaccgcgagaaguaccucaaguccguccuccgcgagcucgucaccuaccuccucuuccucaucguccucugcauccucaccuacggcaugauguccuccaacgucuacuacuacacccgcaugaugucccagcucuuccucgacacccccgucuccaagaccgagaagaccaacuucaagacccucuccuccauggaggacuucuggaaguucaccgagggcucccuccucgacggccucuacuggaagaugcagcccuccaaccagaccgaggccgacaaccgcuccuucaucuucuacgagaaccuccuccucggcgucccccgcauccgccagcuccgcguccgcaacggcuccugcuccaucccccaggaccuccgcgacgagaucaaggagugcuacgacgucuacuccgucuccuccgaggaccgcgcccccuucggcccccgcaacggcaccgccuggaucuacaccuccgagaaggaccucaacggcuccucccacuggggcaucaucgccaccuacuccggcgccggcuacuaccucgaccucucccgcacccgcgaggagaccgccgcccaggucgccucccucaagaagaacgucuggcucgaccgcggcacccgcgccaccuucaucgacuucuccgucuacaacgccaacaucaaccucuucugcgucguccgccuccucgucgaguuccccgccaccggcggcgucauccccuccuggcaguuccagccccucaagcucauccgcuacgucaccaccuucgacuucuuccucgccgccugcgagaucaucuucugcuucuucaucuucuacuacgucgucgaggagauccucgagauccgcauccacaagcuccacuacuuccgcuccuucuggaacugccucgacgucgucaucgucguccucuccgucgucgccaucggcaucaacaucuaccgcaccuccaacgucgagguccuccuccaguuccucgaggaccagaacaccuuccccaacuucgagcaccucgccuacuggcagauccaguucaacaacaucgccgccgucaccgucuucuucgucuggaucaagcucuucaaguucaucaacuucaaccgcaccaugucccagcucuccaccaccaugucccgcugcgccaaggaccucuucggcuucgccaucauguucuucaucaucuuccucgccuacgcccagcucgccuaccucgucuucggcacccaggucgacgacuucuccaccuuccaggagugcaucuucacccaguuccgcaucauccucggcgacaucaacuucgccgagaucgaggaggccaaccgcguccucggccccaucuacuucaccaccuucgucuucuucauguucuucauccuccucaacauguuccucgccaucaucaacgacaccuacuccgaggucaaguccgaccucgcccagcagaaggccgagauggagcucuccgaccucauccgcaagggcuaccacaaggcccucgucaagcucaagcucaagaagaacaccgucgacgacaucuccgagucccuccgccagggcggcggcaagcucaacuucgacgagcuccgccaggaccucaagggcaagggccacaccgacgccgagaucgaggccaucuucaccaaguacgaccaggacggcgaccaggagcucaccgagcacgagcaccagcagaugcgcgacgaccucgagaaggagcgcgaggaccucgaccucgaccacuccucccucccccgccccauguccucccgcuccuucccccgcucccucgacgacuccgaggaggacgacgacgaggacuccggccacuccucccgccgccgcggcuccaucuccuccggcgucuccuacgaggaguuccagguccucguccgccgcgucgaccgcauggagcacuccaucggcuccaucgucuccaagaucgacgccgucaucgucaagcucgagaucauggagcgcgccaagcucaagcgccgcgagguccucggccgccuccucgacggcgucgccgaggacgagcgccucggccgcgacuccgagauccaccgcgagcagauggagcgccucguccgcgaggagcucgagcgcugggaguccgacgacgccgccucccagaucucccacggccucggcacccccgucggccucaacggccagccccgcccccgcuccucccgccccuccuccucccaguccaccgagggcauggagggcgccggcggcaacggcuccuccaacguccacgucuga

SEQ ID NO: 9253 - RNA, 2907 nt, Artificial Sequence
  derived and/or modified sequence opt3 from PKD2__Homo_sapiens__AAC50520
auggugaacagcuccagaguccagccccaacagccuggcgacgccaagaggccaccggcuccccgggcaccugauccagggcgccugauggccggaugcgcggcuguuggugccucucucgcagcccccggcgggcuuugugagcagcgaggacuggaaaucgagaugcagcguauuagacaagcugcagccagggacccuccagcuggcgccgcggcaucacccaguccuccauugagcuccugcucucggcaggccuggucgcgcgauaauccggguuucgaagcugaggaagaggaggaagagguggaaggggaggagggaggcaugguaguggaaauggacgucgaguggagacccggcucaaggcggagcgccgcaaguuccgcugugucuagcguuggggcccgcucccgaggauuagguggcuaccacggggcgggacauccuucaggcagaaggcggcgucgcgaagaucaggguccacccuguccuaguccagucgggggaggcgacccccugcacagacaucuaccgcucgagggccagccucccaggguggccugggcagaacggcuggugcgagggcuucgcggacugugggguaccagauugauggaggagagcucuacaaacagggaaaaauaucucaaguccguacugcgggagcugguuacuuaccucuuauuucugauagugcuuugcaucuugacguauggcaugaugucaagcaaugucuacuauuacacccgcaugaugagucaacuguuccuagauacaccagugucuaaaacugaaaagaccaacuuuaaaacacucuccagcauggaggacuucuggaaguuuaccgaagggucgcugcuugauggacuguauuggaagaugcagccuucuaaucagacugaggcugacaacagauccuucauuuucuacgagaauuugcuccugggcgugcccaggauccgucaguuacggguccgaaacgguucauguaguauuccacaagaucugagagacgaaaucaaagagugcuacgauguuuauagcguguccucugaagacagggcccccuucgggccucgcaauggcacagcuuggauauacaccagcgagaaggaccucaacggaucaagucacuggggcaucauugccacguauuccggggcaggauacuaucuugaucugagccggacuagagaagagaccgccgcucagguagcgucuuugaaaaagaauguguggcuagacagggguacacgcgcaacuuuuaucgauuucucagucuacaacgccaauauuaaccuguuuugugugguucgacuccugguggaguucccagcuaccggcggggucaucccgaguuggcaguuucaaccccuuaaacugauacgguaugugacaaccuucgacuucuuuuuggccgcaugcgaaauuaucuucugcuuuuucaucuuuuacuacguaguugaggaaauucucgagauccguauucauaagcugcacuauuucaggagcuuuuggaauuguuuagauguggucauagugguccuguccgugguugccaucggaauuaacaucuacagaacgucuaacguggagguacuacuccaguuccuggaagaccagaauacuuuuccuaacuucgagcaccuugcuuauuggcagauacaauuuaauaacauugccgcagucacaguguucuuuguuuggaucaaguuguucaaauucaucaauuuuaaccgcaccaugucgcagcugagcacuacaaugucccggugugcgaaggaucucuucggcuuugcuauuauguucuuuaucauuuuccuggccuacgcacagcuugccuaucugguguuugguacccaggucgacgauuucucaacguuucaagaaugcauauucacccaguuuagaaucauuuugggggacaucaauuucgcugagaucgaagaggccaacagggugcucggcccaauuuacuuuacaacuuucguauucuuuauguucuuuauacuguuaaauauguuccuggcaaucauuaacgauaccuauagugaggugaaaucugaccuagcucagcagaaggccgaaauggagcucagcgaccugauccgaaaaggauaccauaaggcgcuuguuaaauugaagcugaagaaaaauacagucgaugacauuuccgaaucacuccgccaaggcgggggaaagcugaacuuugaugaguuacggcaggaccugaaagguaagggccacacugaugccgaaaucgaggcuauauucaccaaauacgaccaggauggggaccaggagcuuacagaacaugagcaccaacagaugagagaugacuuggaaaaggagagggaagaucucgaccuggaucacagcucucuaccccguccuauguccagucgcagcuuuccacggucucuggacgacuccgaggaggaugacgaugaagacucaggacauaguagcagaaggcgaggcucgaucuccucuggugugagcuaugaggaauuucaggugcucguccggcgcguugauagaauggagcacucaauugggaguaucguguccaagauugacgcagugaucguaaaacuggagauaauggaaagggccaaacuuaagcggcgagaggucuugggcagacuguuagauggaguggcugaagacgagcgccucggcagggauucugaaauucaucgugagcaaauggagcggcugguuagagaggaacuugaaaggugggagagcgacgaugccgcaucccagaucucacacgggcugggaacccccgugggcuugaauggucagccgcgcccucgaagcaguagaccaucuuccagccagucgacugaagggauggagggagcgggcgguaacggcucaucuaauguccauguguga

SEQ ID NO: 9254 - RNA, 2907 nt, Artificial Sequence
  derived and/or modified sequence opt4 from PKD2__Homo_sapiens__AAC50520
auggugaacagcagcagagugcagccccagcagcccggcgacgccaagagaccccccgcccccagagcccccgaccccggcagacugauggccggcugcgccgccgugggcgccagccuggccgcccccggcggccugugcgagcagagaggccuggagaucgagaugcagagaaucagacaggccgccgccagagacccccccgccggcgccgccgccagccccagccccccccugagcagcugcagcagacaggccuggagcagagacaaccccggcuucgaggccgaggaggaggaggaggagguggagggcgaggagggcggcauggugguggagauggacguggaguggagacccggcagcagaagaagcgccgccagcagcgccgugagcagcgugggcgccagaagcagaggccugggcggcuaccacggcgccggccaccccagcggcagaagaagaagaagagaggaccagggcccccccugccccagccccgugggcggcggcgacccccugcacagacaccugccccuggagggccagccccccagaguggccugggccgagagacuggugagaggccugagaggccuguggggcaccagacugauggaggagagcagcaccaacagagagaaguaccugaagagcgugcugagagagcuggugaccuaccugcuguuccugaucgugcugugcauccugaccuacggcaugaugagcagcaacguguacuacuacaccagaaugaugagccagcuguuccuggacacccccgugagcaagaccgagaagaccaacuucaagacccugagcagcauggaggacuucuggaaguucaccgagggcagccugcuggacggccuguacuggaagaugcagcccagcaaccagaccgaggccgacaacagaagcuucaucuucuacgagaaccugcugcugggcgugcccagaaucagacagcugagagugagaaacggcagcugcagcaucccccaggaccugagagacgagaucaaggagugcuacgacguguacagcgugagcagcgaggacagagcccccuucggccccagaaacggcaccgccuggaucuacaccagcgagaaggaccugaacggcagcagccacuggggcaucaucgccaccuacagcggcgccggcuacuaccuggaccugagcagaaccagagaggagaccgccgcccagguggccagccugaagaagaacguguggcuggacagaggcaccagagccaccuucaucgacuucagcguguacaacgccaacaucaaccuguucugcguggugagacugcugguggaguuccccgccaccggcggcgugauccccagcuggcaguuccagccccugaagcugaucagauacgugaccaccuucgacuucuuccuggccgccugcgagaucaucuucugcuucuucaucuucuacuacgugguggaggagauccuggagaucagaauccacaagcugcacuacuucagaagcuucuggaacugccuggacguggugaucguggugcugagcgugguggccaucggcaucaacaucuacagaaccagcaacguggaggugcugcugcaguuccuggaggaccagaacaccuuccccaacuucgagcaccuggccuacuggcagauccaguucaacaacaucgccgccgugaccguguucuucguguggaucaagcuguucaaguucaucaacuucaacagaaccaugagccagcugagcaccaccaugagcagaugcgccaaggaccuguucggcuucgccaucauguucuucaucaucuuccuggccuacgcccagcuggccuaccugguguucggcacccagguggacgacuucagcaccuuccaggagugcaucuucacccaguucagaaucauccugggcgacaucaacuucgccgagaucgaggaggccaacagagugcugggccccaucuacuucaccaccuucguguucuucauguucuucauccugcugaacauguuccuggccaucaucaacgacaccuacagcgaggugaagagcgaccuggcccagcagaaggccgagauggagcugagcgaccugaucagaaagggcuaccacaaggcccuggugaagcugaagcugaagaagaacaccguggacgacaucagcgagagccugagacagggcggcggcaagcugaacuucgacgagcugagacaggaccugaagggcaagggccacaccgacgccgagaucgaggccaucuucaccaaguacgaccaggacggcgaccaggagcugaccgagcacgagcaccagcagaugagagacgaccuggagaaggagagagaggaccuggaccuggaccacagcagccugcccagacccaugagcagcagaagcuuccccagaagccuggacgacagcgaggaggacgacgacgaggacagcggccacagcagcagaagaagaggcagcaucagcagcggcgugagcuacgaggaguuccaggugcuggugagaagaguggacagaauggagcacagcaucggcagcaucgugagcaagaucgacgccgugaucgugaagcuggagaucauggagagagccaagcugaagagaagagaggugcugggcagacugcuggacggcguggccgaggacgagagacugggcagagacagcgagauccacagagagcagauggagagacuggugagagaggagcuggagagaugggagagcgacgacgccgccagccagaucagccacggccugggcacccccgugggccugaacggccagcccagacccagaagcagcagacccagcagcagccagagcaccgagggcauggagggcgccggcggcaacggcagcagcaacgugcacguguga

SEQ ID NO: 9255 - RNA, 2907 nt, Artificial Sequence
  derived and/or modified sequence opt5 from PKD2__Homo_sapiens__AAC50520
auggugaacagcuccagaguccagccccaacagccuggcgacgccaagcggccgcccgcuccucgcgcccccgauccugggagacugauggcgggaugcgcugccguuggcgccucucucgcugcccccgggggacugugugagcagcggggccuugaaaucgagaugcagcgcauuagacaagcugccgcgcgggacccuccggccggggcugccgcuagccccuccccuccccugucuagcugcucccgccaggccuggucuagagauaauccuggauucgaagcggaggaagaggaggaagagguggaaggcgaggagggcgggaugguggucgaaauggacguggaguggcggcccggaagccgcagauccgccgcuagcucugccguuuccagcgugggcgcucggucucgcgggcucggaggcuaccacggggccggacauccguccggcagacggcgcagacgggaagaucagggcccucccuguccuagccccgucgggggaggcgacccccugcacagacaucuuccucuggaggggcagccgccccgcguggccugggcugaacggcucguuagaggacugcgcggccugugggggacccggcucauggaggagucuuccacaaacagagaaaaauaucuuaagagcgugcuucgcgagcuggucacguaccuccuguuucuuaucgugcugugcauucucaccuauggaaugauguccucuaauguguacuauuacacacggaugaugagccaacuguuccuggauaccccugucuccaaaacagaaaagaccaacuuuaaaacacucagcucuauggaggacuucuggaaguuuaccgaaggcucccugcuugauggccuguauuggaagaugcagcccagcaaucagacggaggcggacaacagaucuuucaucuuuuacgagaaucuccugcuugggguuccucgcauucggcagcugagagugcgcaacggaagcuguuccaucccccaagaucuccgggacgaaaucaaagagugcuacgauguguauucugucagcuccgaagacagagccccguucggcccucggaaugggaccgcuuggauuuacacaagcgagaaggaccugaacggaucuucccacuggggcaucauugccaccuauagcggggccggcuacuaucuggaucucucucgcacaagagaagagaccgcugcccagguggcgucccugaaaaagaauguuuggcuugaccggggaacgagagcuacauuuaucgauuucagcguguacaacgccaauauuaaccuguuuugugucgugcgccuccugguugaguuccccgccaccggcggggugaucccuuccuggcaguuucaaccccuuaaacugauucgguaugucacaaccuucgacuucuuucucgcugccugcgaaaucaucuucuguuucuucaucuuuuacuacguggucgaggaaauucuggagauuagaauccauaagcugcacuauuuccgcucuuuuuggaauugccucgaugugguuauugugguccugagcgugguugcuaucggaaucaacauuuacagaaccuccaacguggagguccuucugcaguuccucgaagaccagaauacauuuccuaacuucgagcaccuggccuauuggcagauccaauuuaauaacauugcggccgugacgguguucuuuguuuggaucaagcuguucaaauucauuaauuuuaaccggaccaugucucagcuuagcacaaccaugucccgcugugcuaaggaucucuucggcuuugccaucauguucuuuaucauuuuccuggcuuacgcccagcuggcguaucucgucuuugggacacagguggacgauuucagcaccuuucaagaaugcaucuucacgcaguuuagaauuauccugggagacauuaauuucgccgagaucgaagaggcuaaccgggugcuuggccccauuuacuuuacaaccuucgucuucuuuauguucuuuauccugcucaauauguuccuggccaucauuaacgauaccuauucugaggugaaauccgaccuggcucagcagaaggccgaaauggagcuuagcgaccucauccgcaaaggguaccauaaggcccugguuaaacugaagcucaagaaaaauacaguggaugacauuucugaaucccugagacaaggcggaggcaagcugaacuuugaugagcugcggcaggaccucaaagggaagggacacaccgaugcugaaaucgaggcgauuuucacaaaauacgaccaggauggcgaccaggagcugacggaacaugagcaccaacagaugcgcgaugaccuggaaaaggagagagaagaucuugaccucgaucacagcucucugccgcggccuaugagcucccgcagcuuucccagaucucuggacgacuccgaggaggaugacgaugaagacagcgggcauuccucucggagacgcggaagcaucuccucuggcgucagcuaugaggaauuucaggugcucguucggagaguggaucgcauggagcacuccaucgggucuauugucagcaagaucgacgccgugauuguuaaacuggagaucauggaacgggcuaaacuuaagagacgcgaggugcugggccggcuccuggauggagucgccgaagacgagagacugggccgcgauuccgaaauucaucgggagcaaauggagagacuugugcgggaggaacucgaacgcugggagagcgacgaugccgcuucucagaucucccacgggcugggaacccccgugggccugaaugggcagccuagaccgcggagcucucgccccuccagcucucaguccacagaaggaauggagggcgccgggggcaacggaagcuccaauguccauguuuga

SEQ ID NO: 9256 - protein, 942 aa, Artificial Sequence
  PKN1__Homo_sapiens__Q16512
MASDAVQSEPRSWSLLEQLGLAGADLAAPGVQQQLELERERLRREIRKELKLKEGAENLRRATTDLGRSLGPVELLLRGSSRRLDLLHQQLQELHAHVVLPDPAATHDGPQSPGAGGPTCSATNLSRVAGLEKQLAIELKVKQGAENMIQTYSNGSTKDRKLLLTAQQMLQDSKTKIDIIRMQLRRALQAGQLENQAAPDDTQGSPDLGAVELRIEELRHHFRVEHAVAEGAKNVLRLLSAAKAPDRKAVSEAQEKLTESNQKLGLLREALERRLGELPADHPKGRLLREELAAASSAAFSTRLAGPFPATHYSTLCKPAPLTGTLEVRVVGCRDLPETIPWNPTPSMGGPGTPDSRPPFLSRPARGLYSRSGSLSGRSSLKAEAENTSEVSTVLKLDNTVVGQTSWKPCGPNAWDQSFTLELERARELELAVFWRDQRGLCALKFLKLEDFLDNERHEVQLDMEPQGCLVAEVTFRNPVIERIPRLRRQKKIFSKQQGKAFQRARQMNIDVATWVRLLRRLIPNATGTGTFSPGASPGSEARTTGDISVEKLNLGTDSDSSPQKSSRDPPSSPSSLSSPIQESTAPELPSETQETPGPALCSPLRKSPLTLEDFKFLAVLGRGHFGKVLLSEFRPSGELFAIKALKKGDIVARDEVESLMCEKRILAAVTSAGHPFLVNLFGCFQTPEHVCFVMEYSAGGDLMLHIHSDVFSEPRAIFYSACVVLGLQFLHEHKIVYRDLKLDNLLLDTEGYVKIADFGLCKEGMGYGDRTSTFCGTPEFLAPEVLTDTSYTRAVDWWGLGVLLYEMLVGESPFPGDDEEEVFDSIVNDEVRYPRFLSAEAIGIMRRLLRRNPERRLGSSERDAEDVKKQPFFRTLGWEALLARRLPPPFVPTLSGRTDVSNFDEEFTGEAPTLSPPRDARPLTAAEQAAFLDFDFVAGGC

SEQ ID NO: 9257 - RNA, 2829 nt, Artificial Sequence
  PKN1__Homo_sapiens__BAA05169
auggccagcgacgccgugcagagugagccucgcagcuggucccugcuagagcagcugggccuggccggggcagaccuggcggcccccgggguacagcagcagcuggagcuggagcgggagcggcugcggcgggaaauccgcaaggagcugaagcugaaggagggugcugagaaccugcggcgggccaccacugaccugggccgcagccugggccccguagagcugcugcugcggggcuccucgcgccgccucgaccugcugcaccagcagcugcaggagcugcacgcccacguggugcuucccgacccggcggccacccacgauggcccccaguccccuggugcggguggccccaccugcucggccaccaaccugagccgcguggcgggccuggagaagcaguuggccauugagcugaaggugaagcagggggcggagaacaugauccagaccuacagcaauggcagcaccaaggaccggaagcugcugcugacagcccagcagauguugcaggacaguaagaccaagauugacaucauccgcaugcaacuccgccgggcgcugcaggccggccagcuggagaaccaggcagccccggaugacacccaagggaguccugaccugggggcuguggagcugcgcaucgaagagcugcggcaccacuuccgaguggagcacgcgguggccgagggugccaagaacguacugcgccugcucagcgcugccaaggccccggaccgcaaggcagucagcgaggcccaggagaaauugacagaauccaaccagaagcuggggcugcugcgggaggcucuggagcggagacuuggggagcugcccgccgaccaccccaaggggcggcugcugcgagaagagcucgcugcggccuccuccgcugccuucagcacccgccuggccgggcccuuucccgccacgcacuacagcacccugugcaagcccgcgccgcucacagggacccuggagguacgaguggugggcugcagagaccucccagagaccaucccguggaacccuacccccucaauggggggaccugggaccccagacagccgcccccccuuccugagccgcccagcccggggccuuuacagccgaagcggaagccucaguggccggagcagccucaaagcagaagccgagaacaccagugaagucagcacugugcuuaagcuggauaacacagugguggggcagacgucuuggaagccauguggccccaaugccugggaccagagcuucacucuggagcuggaaagggcacgggaacuggaguuggcuguguucuggcgggaccagcggggccugugugcccucaaauuccugaaguuggaggauuucuuggacaaugagaggcaugaggugcagcuggacauggaaccccagggcugccugguggcugaggucaccuuccgcaacccugucauugagaggauuccucggcuccgacggcagaagaaaauuuucuccaagcagcaagggaaggcguuccagcgugcuaggcagaugaacaucgaugucgccacgugggugcggcugcuccggaggcucauccccaaugccacgggcacaggcaccuuuagcccuggggcuucuccaggauccgaggcccggaccacgggugacauaucgguggagaagcugaaccucggcacugacucggacagcucaccucagaagagcucgcgggauccuccuuccagcccaucgagccugagcucccccauccaggaauccacugcucccgagcugccuucggagacccaggagaccccaggccccgcccugugcagcccucugaggaagucaccucugacccucgaagauuucaaguuccuggcggugcugggccggggucauuuugggaaggugcuccucuccgaauuccggcccaguggggagcuguucgccaucaaggcucugaagaaaggggacauuguggcccgagacgagguggagagccugaugugugagaagcggauauuggcggcagugaccagugcgggacaccccuuccuggugaaccucuucggcuguuuccagacaccggagcacgugugcuucgugauggaguacucggccgguggggaccugaugcugcacauccacagcgacguguucucugagccccgugccaucuuuuauuccgccugcguggugcugggccuacaguuucuucacgaacacaagaucgucuacagggaccugaaguuggacaauuugcuccuggacaccgagggcuacgucaagaucgcagacuuuggccucugcaaggaggggaugggcuauggggaccggaccagcacauucugugggaccccggaguuccuggccccugaggugcugacggacacgucguacacgcgagcuguggacugguggggacugggugugcugcucuacgagaugcugguuggcgaguccccauucccaggggaugaugaggaggaggucuucgacagcaucgucaacgacgagguucgcuacccccgcuuccugucggccgaagccaucggcaucaugagaaggcugcuucggaggaacccagagcggaggcugggaucuagcgagagagaugcagaagaugugaagaaacagcccuucuucaggacucugggcugggaagcccuguuggcccggcgccugccaccgcccuuugugcccacgcuguccggccgcaccgacgucagcaacuucgacgaggaguucaccggggaggcccccacacugagcccgccccgcgacgcgcggccccuuacagccgcggagcaggcagccuuccuggacuucgacuucguggccgggggcugcuag

SEQ ID NO: 9258 - RNA, 2829 nt, Artificial Sequence
  derived and/or modified sequence opt1 from PKN1__Homo_sapiens__BAA05169
auggccagcgacgccgugcaguccgagccccgcagcuggucccugcucgagcagcugggccuggcgggggccgaccucgccgccccgggcguccagcagcagcuggagcuggagcgggagcgccuccggcgcgagauccggaaggagcugaagcugaaggagggggccgagaaccuccgccgggcgaccaccgaccugggccgcagccuggggcccguggagcuccugcugcggggcuccagccgccggcucgaccugcugcaccagcagcuccaggagcugcacgcccacgugguccugcccgaccccgccgccacgcacgacggcccgcagucccccggggcgggcgggccgaccugcagcgccaccaaccucucccgcguggccggccuggagaagcagcuggccaucgagcucaaggugaagcagggggccgagaacaugauccagaccuacagcaacggcuccacgaaggaccggaagcugcugcucaccgcgcagcagaugcugcaggacagcaagaccaagaucgacaucauccgcaugcagcugcggcgcgcccuccaggccggccagcuggagaaccaggccgcccccgacgacacccaggggucccccgaccugggcgcggucgagcuccggaucgaggagcugcgccaccacuuccggguggagcacgccguggccgagggggccaagaacguccugcgccuccugagcgccgcgaaggcccccgaccggaaggccguguccgaggcccaggagaagcugacggagagcaaccagaagcucggccugcugcgcgaggcccucgagcgccggcugggcgagcugcccgcggaccaccccaaggggcgccuccugcgggaggagcuggccgccgccuccagcgcggccuucuccacccgccucgccggcccguuccccgccacccacuacagcacccugugcaagcccgcgccccugacggggacccuggaggugcgggucgugggcugccgcgaccucccggagaccauccccuggaaccccacccccagcaugggcgggccgggcacgcccgacucccggccgcccuuccugagccgccccgcccgggggcuguacucccgcagcggcucccucagcgggcgguccagccugaaggccgaggccgagaacaccuccgaggugagcaccguccugaagcucgacaacaccguggugggccagacguccuggaagcccugcgggcccaacgccugggaccagagcuucacccuggagcuggagcgcgcccgggagcucgagcuggcggucuucuggcgcgaccagcggggccugugcgcccucaaguuccugaagcuggaggacuuccucgacaacgagcgccacgaggugcagcuggacauggagccccagggcugccugguggccgaggucaccuuccggaacccggugaucgagcgcaucccccggcuccgccgccagaagaagaucuucuccaagcagcaggggaaggccuuccagcgggcccgccagaugaacaucgacguggcgaccuggguccggcugcugcgccggcucauccccaacgccacgggcaccgggaccuucagcccgggcgccucccccgggagcgaggcccgcaccacgggcgacaucuccguggagaagcugaaccugggcaccgacagcgacuccagcccccagaaguccagccgggacccgcccagcucccccagcucccucagcucccccauccaggagagcaccgcgcccgagcugccguccgagacccaggagacgcccgggcccgcccugugcagcccccuccgcaaguccccgcugacccuggaggacuucaaguuccucgccguccugggccgggggcacuucggcaaggugcugcucagcgaguuccgccccuccggcgagcuguucgccaucaaggcccugaagaagggggacaucguggcgcgggacgaggucgagagccucaugugcgagaagcgcauccuggccgccgugaccuccgccggccaccccuuccuggugaaccucuucgggugcuuccagacccccgagcacgucugcuucgugauggaguacagcgccggcggggaccugaugcugcacauccacuccgacguguucagcgagccgcgggcgaucuucuacagcgccugcgucgugcucggccugcaguuccugcacgagcacaagaucguguaccgcgaccucaagcuggacaaccugcuccuggacacggagggcuacgucaagaucgccgacuucgggcugugcaaggagggcaugggguacggcgaccggaccuccaccuucugcgggacccccgaguuccucgcccccgaggugcugaccgacacgagcuacacccgcgccguggacugguggggccugggcguccuccuguacgagaugcuggugggggagucccccuucccgggcgacgacgaggaggagguguucgacagcaucgucaacgacgaggugcgguacccccgcuuccucuccgcggaggccaucgggaucaugcggcgccugcugcggcgcaaccccgagcgccggcucggcagcuccgagcgcgacgccgaggacgugaagaagcagcccuucuuccggacccuggggugggaggcccugcucgcgcgccggcugccgccgcccuucguccccacccugagcggccgcacggacguguccaacuucgacgaggaguucaccggcgaggcccccacccucagcccgccccgggacgcccgcccccugaccgccgccgagcaggcggccuuccuggacuucgacuucguggccgggggcugcuga

SEQ ID NO: 9259 - RNA, 2829 nt, Artificial Sequence
  derived and/or modified sequence opt2 from PKN1__Homo_sapiens__BAA05169
auggccuccgacgccguccaguccgagccccgcuccuggucccuccucgagcagcucggccucgccggcgccgaccucgccgcccccggcguccagcagcagcucgagcucgagcgcgagcgccuccgccgcgagauccgcaaggagcucaagcucaaggagggcgccgagaaccuccgccgcgccaccaccgaccucggccgcucccucggccccgucgagcuccuccuccgcggcuccucccgccgccucgaccuccuccaccagcagcuccaggagcuccacgcccacgucguccuccccgaccccgccgccacccacgacggcccccagucccccggcgccggcggccccaccugcuccgccaccaaccucucccgcgucgccggccucgagaagcagcucgccaucgagcucaaggucaagcagggcgccgagaacaugauccagaccuacuccaacggcuccaccaaggaccgcaagcuccuccucaccgcccagcagaugcuccaggacuccaagaccaagaucgacaucauccgcaugcagcuccgccgcgcccuccaggccggccagcucgagaaccaggccgcccccgacgacacccagggcucccccgaccucggcgccgucgagcuccgcaucgaggagcuccgccaccacuuccgcgucgagcacgccgucgccgagggcgccaagaacguccuccgccuccucuccgccgccaaggcccccgaccgcaaggccgucuccgaggcccaggagaagcucaccgaguccaaccagaagcucggccuccuccgcgaggcccucgagcgccgccucggcgagcuccccgccgaccaccccaagggccgccuccuccgcgaggagcucgccgccgccuccuccgccgccuucuccacccgccucgccggccccuuccccgccacccacuacuccacccucugcaagcccgccccccucaccggcacccucgagguccgcgucgucggcugccgcgaccuccccgagaccauccccuggaaccccacccccuccaugggcggccccggcacccccgacucccgcccccccuuccucucccgccccgcccgcggccucuacucccgcuccggcucccucuccggccgcuccucccucaaggccgaggccgagaacaccuccgaggucuccaccguccucaagcucgacaacaccgucgucggccagaccuccuggaagcccugcggccccaacgccugggaccaguccuucacccucgagcucgagcgcgcccgcgagcucgagcucgccgucuucuggcgcgaccagcgcggccucugcgcccucaaguuccucaagcucgaggacuuccucgacaacgagcgccacgagguccagcucgacauggagccccagggcugccucgucgccgaggucaccuuccgcaaccccgucaucgagcgcaucccccgccuccgccgccagaagaagaucuucuccaagcagcagggcaaggccuuccagcgcgcccgccagaugaacaucgacgucgccaccuggguccgccuccuccgccgccucauccccaacgccaccggcaccggcaccuucucccccggcgccucccccggcuccgaggcccgcaccaccggcgacaucuccgucgagaagcucaaccucggcaccgacuccgacuccuccccccagaaguccucccgcgacccccccuccucccccuccucccucuccucccccauccaggaguccaccgcccccgagcuccccuccgagacccaggagacccccggccccgcccucugcuccccccuccgcaaguccccccucacccucgaggacuucaaguuccucgccguccucggccgcggccacuucggcaagguccuccucuccgaguuccgccccuccggcgagcucuucgccaucaaggcccucaagaagggcgacaucgucgcccgcgacgaggucgagucccucaugugcgagaagcgcauccucgccgccgucaccuccgccggccaccccuuccucgucaaccucuucggcugcuuccagacccccgagcacgucugcuucgucauggaguacuccgccggcggcgaccucaugcuccacauccacuccgacgucuucuccgagccccgcgccaucuucuacuccgccugcgucguccucggccuccaguuccuccacgagcacaagaucgucuaccgcgaccucaagcucgacaaccuccuccucgacaccgagggcuacgucaagaucgccgacuucggccucugcaaggagggcaugggcuacggcgaccgcaccuccaccuucugcggcacccccgaguuccucgcccccgagguccucaccgacaccuccuacacccgcgccgucgacugguggggccucggcguccuccucuacgagaugcucgucggcgagucccccuuccccggcgacgacgaggaggaggucuucgacuccaucgucaacgacgagguccgcuacccccgcuuccucuccgccgaggccaucggcaucaugcgccgccuccuccgccgcaaccccgagcgccgccucggcuccuccgagcgcgacgccgaggacgucaagaagcagcccuucuuccgcacccucggcugggaggcccuccucgcccgccgccuccccccccccuucguccccacccucuccggccgcaccgacgucuccaacuucgacgaggaguucaccggcgaggcccccacccucucccccccccgcgacgcccgcccccucaccgccgccgagcaggccgccuuccucgacuucgacuucgucgccggcggcugcuga

SEQ ID NO: 9260 - RNA, 2829 nt, Artificial Sequence
  derived and/or modified sequence opt3 from PKN1__Homo_sapiens__BAA05169
auggccagcgacgcugugcaguccgagcccagaucuuggucacugcucgaacaacuuggccuggcaggggccgauuuggcggcuccuggaguccagcagcaguuagagcuggaaagggagcggcuacgccgagaaauccguaaggagcucaaacugaaggagggugccgaaaaccuuagaagggcaaccacagaccugggccggaguuuggggccaguugagcuccugcugcgcggaagcuccagaaggcucgauuuacugcaccaacagcuucaggaauugcaugcccacgugguacugccggaccccgcugcaacucaugauggcccucagucuccaggugccgggggacccacgugcucggcuaccaaucuaucacggguggccggccucgagaaacaacuggcgauugagcuuaaggucaaacagggcgcagaaaacaugauacagacauacagcaaugggaguacuaaggaccgcaagcuguugcucaccgcccagcaaaugcugcaggauuccaaaacaaagaucgacauuauccgaaugcaguuaagaagggcucugcaagccggacagcucgagaaccaggcagcuccugaugacacccaggguucuccagaucuuggcgccguggaacugcggauugaggaauugcgucaccauuuccgcguugagcacgcgguggccgagggggcaaagaauguccuaagacugcucagcgcugccaaggcucccgacaggaaagccguguccgaagcacaagagaagcugacugaaucaaaccagaaacuuggacuguugcgggaggcccucgaacgacgccugggcgaguuaccugcugaucacccaaaagguagacugcuaagggaggaacucgcggcagccaguagcgcugccuuuucuacacggcuggcagggccguuccccgccacccauuauuccacgcuuuguaagccugcuccauugacuggaacccuggagguacgcguugugggcugcagagaccuccccgaaacaaucccuuggaauccaacucccucaaugggcgggccgggaaccccugacagcaggcccccauuucugagucguccugcccggggucuuuacucucgauccggcagccugucggggagaucuuccuugaaagcagaggcggaaaacacaucagaggucaguaccgugcucaagcuggauaauacgguggucggacagacuagcuggaaacccuguggcccaaacgcuugggaccaguccuucacauuagagcuggaaagggcccgcgagcuagaacucgcaguuuucuggcgggaucaaagaggucugugcgcccuuaaguucuugaaacuggaggacuuucucgauaaugagaggcacgaagugcagcuggacauggagccccagggguguuuaguagcugaagugaccuuccgcaacccugucauagagcgaaucccacggcugcguagacagaagaagaucuuuucuaaacaacagggcaaggccuuccagagggcacgccagaugaauauugauguggcuacuuggguucggcuuuugagaaggcucauuccgaacgccacaggaaccggcacguuuagccccggggcgucaccuggaagugaagcccgaaccacaggugacaucuccguggagaaacugaaucuaggcacugauagcgacucuucaccacaaaagaguagccgcgaucccccuuccucuccaucgagccuguccucacccauacaggagaguaccgcuccggaacucccuucugagacacaggaaacuccagggcccgcacugugcagcccucuucggaaaucccccuugacccuggaggacuucaaguuuuuagccguccucggaagaggccauuucgguaaggugcugcuuucagaauuuaggccaagcggggagcuguuugcuauuaaagccuugaagaaaggcgacaucguagcacgugaugagguugaaucucucaugugugagaagcgcauucuggcggccgugacauccgcuggacacccuuuccuagucaaccuguuuggcugcuuccaaacccccgaacacguguguuuugucauggaguauagugccgggggagaccucaugcugcauauccacagcgauguguucucugaaccacgggcaaucuuuuacuccgcuugcguugugcuugguuugcaguuccugcaugagcacaaaauuguauauagagacuuaaagcucgauaaccugcuucuggacacugagggcuacgucaagauagccgauuuugggcuauguaaagaaggaaugggcuauggugacaggacgucaacauucugcgggaccccggaguuucucgcaccugaagugcugacugauaccaguuacacacgagccguugacugguggggcuugggagugcuguuauacgagaugcucgucggcgagagccccuucccaggggaugacgaagaggaaguguuugauucgaucguaaaugacgaggugcgguauccccgcuuccuguccgcugaagcgauuggaaucaugagaaggcuucugcggcgaaacccugagagacgcuugggcucuagcgagagggacgccgaagauguuaagaaacagccauucuuucguacccucgguugggaggcacugcuagcucggagacugcccccuccguucgucccaacucuuucagggaggacagacgugaguaauuuugaugaagaguucacgggagaagcccccacccucuccccuccacgcgacgcccgaccccugacugcugcagagcaggccgcguuuuuggauuucgacuuuguggcuggcgguugcuga

SEQ ID NO: 9261 - RNA, 2829 nt, Artificial Sequence
  derived and/or modified sequence opt4 from PKN1__Homo_sapiens__BAA05169
auggccagcgacgccgugcagagcgagcccagaagcuggagccugcuggagcagcugggccuggccggcgccgaccuggccgcccccggcgugcagcagcagcuggagcuggagagagagagacugagaagagagaucagaaaggagcugaagcugaaggagggcgccgagaaccugagaagagccaccaccgaccugggcagaagccugggccccguggagcugcugcugagaggcagcagcagaagacuggaccugcugcaccagcagcugcaggagcugcacgcccacguggugcugcccgaccccgccgccacccacgacggcccccagagccccggcgccggcggccccaccugcagcgccaccaaccugagcagaguggccggccuggagaagcagcuggccaucgagcugaaggugaagcagggcgccgagaacaugauccagaccuacagcaacggcagcaccaaggacagaaagcugcugcugaccgcccagcagaugcugcaggacagcaagaccaagaucgacaucaucagaaugcagcugagaagagcccugcaggccggccagcuggagaaccaggccgcccccgacgacacccagggcagccccgaccugggcgccguggagcugagaaucgaggagcugagacaccacuucagaguggagcacgccguggccgagggcgccaagaacgugcugagacugcugagcgccgccaaggcccccgacagaaaggccgugagcgaggcccaggagaagcugaccgagagcaaccagaagcugggccugcugagagaggcccuggagagaagacugggcgagcugcccgccgaccaccccaagggcagacugcugagagaggagcuggccgccgccagcagcgccgccuucagcaccagacuggccggccccuuccccgccacccacuacagcacccugugcaagcccgccccccugaccggcacccuggaggugagaguggugggcugcagagaccugcccgagaccauccccuggaaccccacccccagcaugggcggccccggcacccccgacagcagaccccccuuccugagcagacccgccagaggccuguacagcagaagcggcagccugagcggcagaagcagccugaaggccgaggccgagaacaccagcgaggugagcaccgugcugaagcuggacaacaccguggugggccagaccagcuggaagcccugcggccccaacgccugggaccagagcuucacccuggagcuggagagagccagagagcuggagcuggccguguucuggagagaccagagaggccugugcgcccugaaguuccugaagcuggaggacuuccuggacaacgagagacacgaggugcagcuggacauggagccccagggcugccugguggccgaggugaccuucagaaaccccgugaucgagagaauccccagacugagaagacagaagaagaucuucagcaagcagcagggcaaggccuuccagagagccagacagaugaacaucgacguggccaccugggugagacugcugagaagacugauccccaacgccaccggcaccggcaccuucagccccggcgccagccccggcagcgaggccagaaccaccggcgacaucagcguggagaagcugaaccugggcaccgacagcgacagcagcccccagaagagcagcagagacccccccagcagccccagcagccugagcagccccauccaggagagcaccgcccccgagcugcccagcgagacccaggagacccccggccccgcccugugcagcccccugagaaagagcccccugacccuggaggacuucaaguuccuggccgugcugggcagaggccacuucggcaaggugcugcugagcgaguucagacccagcggcgagcuguucgccaucaaggcccugaagaagggcgacaucguggccagagacgagguggagagccugaugugcgagaagagaauccuggccgccgugaccagcgccggccaccccuuccuggugaaccuguucggcugcuuccagacccccgagcacgugugcuucgugauggaguacagcgccggcggcgaccugaugcugcacauccacagcgacguguucagcgagcccagagccaucuucuacagcgccugcguggugcugggccugcaguuccugcacgagcacaagaucguguacagagaccugaagcuggacaaccugcugcuggacaccgagggcuacgugaagaucgccgacuucggccugugcaaggagggcaugggcuacggcgacagaaccagcaccuucugcggcacccccgaguuccuggcccccgaggugcugaccgacaccagcuacaccagagccguggacugguggggccugggcgugcugcuguacgagaugcuggugggcgagagccccuuccccggcgacgacgaggaggagguguucgacagcaucgugaacgacgaggugagauaccccagauuccugagcgccgaggccaucggcaucaugagaagacugcugagaagaaaccccgagagaagacugggcagcagcgagagagacgccgaggacgugaagaagcagcccuucuucagaacccugggcugggaggcccugcuggccagaagacugcccccccccuucgugcccacccugagcggcagaaccgacgugagcaacuucgacgaggaguucaccggcgaggcccccacccugagcccccccagagacgccagaccccugaccgccgccgagcaggccgccuuccuggacuucgacuucguggccggcggcugcuga

SEQ ID NO: 9262 - RNA, 2829 nt, Artificial Sequence
  derived and/or modified sequence opt5 from PKN1__Homo_sapiens__BAA05169
auggccagcgacgcugugcaguccgagcccagaucuuggagccugcucgaacaacugggccuugccggggcggaucuggcugccccuggaguccagcagcagcucgagcuggaacgggagcgccuuagacgggaaauccgcaaggagcugaaacucaaggagggcgccgaaaaccugagacgggcuaccacagaccuggggcgcucccucggaccgguugagcugcuucugagaggcucuagccggcgccucgaucugcuucaccaacagcugcaggaacuccaugcccacguggugcugcccgacccugcugccacgcaugaugggccccaguccccuggagcgggcggcccuaccugcucugccacaaaucugagcagagucgcugggcucgagaaacaacuggccauugagcuuaaggugaaacagggagcugaaaacaugauccagaccuacuccaauggcagcacaaaggaccggaagcugcuccugaccgcccagcaaaugcuucaggauucuaaaacaaagauugacaucauucgcaugcagcugagacgggcgcuccaagccgggcagcuggagaaccaggcugcccccgaugacacccagggauccccggaucugggcgcuguugaacuccgcaucgaggaacugagacaccauuuccggguggagcacgccgucgccgagggggcuaaaaaugugcuuagacugcucagcgcggccaaggcucccgaccgcaaagccguuucugaagcccaagagaagcugacggaauccaaccagaaacuuggacugcuccgggaggcucuggaaagacgccugggcgagcucccugccgaucaccccaagggccggcugcuuagagaggaacuggcggcugccagcucugccgcuuuuuccacccgccucgccgggccuuuccccgcuacacauuauagcacccuguguaagccggccccucugacaggaacccuugaggugcgggucgugggcugcagagaccuccccgaaacgaucccuuggaaucccacacccuccaugggagggccuggcaccccggacucucggcccccuuuucugagccgccccgcgagagggcuguacucccgcagcggaucucucuccggccggagcucucugaaagccgaggcugaaaacacaagcgagguguccaccguccuuaagcuggauaauaccguugugggccagacaucuuggaaaccuugugggcccaacgccugggaccagagcuucacgcucgagcuggaaagagcucgggagcuggaacuugccguguuuuggcgcgaucaaagaggacucugcgcgcugaaguuccugaaacucgaggacuuucuggauaaugagcggcacgaaguccagcuugacauggagccgcagggcugucugguggccgaaguuaccuucagaaacccugugauugagcgcaucccccggcucagacgccagaagaagauuuucuccaaacaacaggggaaggcuuuccagagagcccggcagaugaauaucgaugucgcuacaugggugcgccugcugagacggcuuauuccuaacgccaccggaacaggcaccuuuagccccggggccucuccuggcuccgaagcucgcacgacaggagacaucagcguugagaaacucaaucugggcaccgauucugacuccagcccccaaaaguccucuagagauccgccuagcucccccucuagccuguccagccccauucaggagucuaccgcgccugaacucccguccgagacacaggaaacccccgggccugcccugugcagcccccuucggaaaucuccucugacacucgaggacuucaaguuucuggcugugcugggacgcggccauuucgggaagguccuucucuccgaauuuagacccagcggagagcuguuugccaucaaagcccugaagaaaggcgacaucguggcucgggaugaggucgaaucucucaugugugagaagcgcauucuggccgcggugacgagcgcugggcacccuuuccuuguuaaccuguuuggcugcuuccaaacccccgaacacguguguuuugucauggaguauuccgccggaggcgaccucaugcugcauauccacagcgauguguucucugaaccgagagccaucuuuuacuccgcuugcguugugcuggggcuucaguuccugcaugagcacaaaauugucuaucgggaccucaagcuggauaaccuccugcuugacacagagggauacgugaagauugccgauuuuggccuguguaaagaagggaugggauauggcgacagaaccagcacauucugcgggaccccugaguuucucgcgcccgaagugcugacggauaccuccuacacacgcgcuguugacugguggggccugggaguccuucuguacgagaugcucgugggcgagucuccuuuccccggggaugacgaagaggaaguguuugauagcaucgucaaugacgaggugcgguauccgagauuccuguccgccgaagccaucggaauuaugcgccggcuccugagacgcaacccugagcggagacuuggcucuagcgagcgcgacgcugaagauguuaagaaacagcccuucuuucggacccuggggugggaggcccuccuggcuagacggcugccuccucccuucgugcccacacuuuccggacgcaccgacgucucuaauuuugaugaagaguucacgggcgaagccccgacacugagcccucccagagacgcgcggccccucaccgccgcugagcaggccgcuuuucuggauuucgacuuuguggccgggggcugcuga

SEQ ID NO: 9263 - protein, 984 aa, Artificial Sequence
  PKN2__Homo_sapiens__Q16513
MASNPERGEILLTELQGDSRSLPFSENVSAVQKLDFSDTMVQQKLDDIKDRIKREIRKELKIKEGAENLRKVTTDKKSLAYVDNILKKSNKKLEELHHKLQELNAHIVVSDPEDITDCPRTPDTPNNDPRCSTSNNRLKALQKQLDIELKVKQGAENMIQMYSNGSSKDRKLHGTAQQLLQDSKTKIEVIRMQILQAVQTNELAFDNAKPVISPLELRMEELRHHFRIEFAVAEGAKNVMKLLGSGKVTDRKALSEAQARFNESSQKLDLLKYSLEQRLNEVPKNHPKSRIIIEELSLVAASPTLSPRQSMISTQNQYSTLSKPAALTGTLEVRLMGCQDILENVPGRSKATSVALPGWSPSETRSSFMSRTSKSKSGSSRNLLKTDDLSNDVCAVLKLDNTVVGQTSWKPISNQSWDQKFTLELDRSRELEISVYWRDWRSLCAVKFLRLEDFLDNQRHGMCLYLEPQGTLFAEVTFFNPVIERRPKLQRQKKIFSKQQGKTFLRAPQMNINIATWGRLVRRAIPTVNHSGTFSPQAPVPTTVPVVDVRIPQLAPPASDSTVTKLDFDLEPEPPPAPPRASSLGEIDESSELRVLDIPGQDSETVFDIQNDRNSILPKSQSEYKPDTPQSGLEYSGIQELEDRRSQQRFQFNLQDFRCCAVLGRGHFGKVLLAEYKNTNEMFAIKALKKGDIVARDEVDSLMCEKRIFETVNSVRHPFLVNLFACFQTKEHVCFVMEYAAGGDLMMHIHTDVFSEPRAVFYAACVVLGLQYLHEHKIVYRDLKLDNLLLDTEGFVKIADFGLCKEGMGYGDRTSTFCGTPEFLAPEVLTETSYTRAVDWWGLGVLIYEMLVGESPFPGDDEEEVFDSIVNDEVRYPRFLSTEAISIMRRLLRRNPERRLGASEKDAEDVKKHPFFRLIDWSALMDKKVKPPFIPTIRGREDVSNFDDEFTSEAPILTPPREPRILSEEEQEMFRDFDYIADWC

SEQ ID NO: 9264 - RNA, 2955 nt, Artificial Sequence
  PKN2__Homo_sapiens__AAB33346
auggcguccaaccccgaacggggggagauucugcucacggaacugcagggggauucccgaagucuuccguuuucugagaaugugagugcuguucaaaaauuagacuuuucagauacaauggugcagcagaaauuggaugauaucaaggaucgaauuaagagagaaauaaggaaagaacugaaaaucaaagaaggagcugaaaaucugaggaaagucacaacagauaaaaaaaguuuggcuuauguagacaacauuuugaaaaaaucaaauaaaaaauuagaagaacuacaucacaagcugcaggaauuaaaugcacauauuguuguaucagauccagaagauauuacagauugcccaaggacuccagauacuccaaauaaugacccucguuguucuacuagcaacaauagauugaaggccuuacaaaaacaauuggauauagaacuuaaaguaaaacaaggugcagagaauaugauacagauguauucaaauggaucuucaaaggaucggaaacuccaugguacagcucagcaacugcuccaggacagcaagacaaaaauagaagucauacgaaugcagauucuucaggcaguccagacuaaugaauuggcuuuugauaaugcaaaaccugugauaaguccucuugaacuucggauggaagaauuaaggcaucauuuuaggauagaguuugcaguagcagaaggugcaaagaauguaaugaaauuacuuggcucaggaaaaguaacagacagaaaagcacuuucagaagcucaagcaagauuuaaugaaucaagucagaaguuggaccuuuuaaaguauucauuagagcaaagauuaaacgaaguccccaagaaucaucccaaaagcaggauuauuauugaagaacuuucacuuguugcugcaucaccaacacuaaguccacgucaaaguaugauaucuacgcaaaaucaauauaguacacuauccaaaccagcagcacuaacagguacuuuggaaguucgucuuaugggcugccaagauauccuagagaaugucccuggacggucaaaagcaacaucaguugcacugccugguuggaguccaagugaaaccagaucaucuuucaugagcagaacgaguaaaaguaaaagcggaaguagucgaaaucuucuaaaaaccgaugacuuguccaaugaugucugugcuguuuugaagcucgauaauacugugguuggccaaacuagcuggaaacccauuuccaaucagucaugggaccagaaguuuacacuggaacuggacaggucacgugaacuggaaauuucaguuuauuggcgugauuggcggucucugugugcuguaaaauuucugagguuagaagauuuuuuagacaaccaacggcauggcaugugucucuauuuggaaccacaggguacuuuauuugcagagguuaccuuuuuuaauccaguuauugaaagaagaccaaaacuucaaagacaaaagaaaauuuuuucaaagcaacaaggcaaaacauuucucagagcuccucaaaugaauauuaauauugccacuuggggaaggcuaguaagaagagcuauuccuacaguaaaucauucuggcaccuucagcccucaagcuccugugccuacuacagugccagugguugauguacgcaucccucaacuagcaccuccagcuagugauucuacaguaaccaaauuggacuuugaucuugagccugaaccuccuccagccccaccacgagcuucuucucuuggagaaauagaugaaucuucugaauuaagaguuuuggauauaccaggacaggauucagagacuguuuuugauauucagaaugacagaaauaguauacuuccaaaaucucaaucugaauacaagccugauacuccucagucaggccuagaauauagugguauucaagaacuugaggacagaagaucucagcaaagguuucaguuuaaucuacaagauuucagguguugugcugucuugggaagaggacauuuuggaaaggugcuuuuagcugaauauaaaaacacaaaugagauguuugcuauaaaagccuuaaagaaaggagauauuguggcucgagaugaaguagacagccugaugugugaaaaaagaauuuuugaaacugugaauaguguaaggcaucccuuuuuggugaaccuuuuugcauguuuccaaaccaaagagcauguuugcuuuguaauggaauaugcugccgguggggaccuaaugaugcacauucauacugaugucuuuucugaaccaagagcuguauuuuaugcugcuuguguaguucuuggguugcaguauuuacaugaacacaaaauuguuuauagagauuugaaauuggauaacuuauugcuagauacagagggcuuugugaaaauugcugauuuuggucuuugcaaagaaggaaugggauauggagauagaacaagcacauuuuguggcacuccugaauuucuugccccagaaguauuaacagaaacuucuuauacaagggcuguagauugguggggccuuggcgugcuuauauaugaaaugcuuguuggugagucucccuuuccuggugaugaugaagaggaaguuuuugacaguauuguaaaugaugaaguaagguauccaagguucuuaucuacagaagccauuucuauaaugagaaggcuguuaagaagaaauccugaacggcgccuuggggcuagcgagaaagaugcagaggauguaaaaaagcacccauuuuuccggcuaauugauuggagcgcucugauggacaaaaaaguaaagccaccauuuauaccuaccauaagaggacgagaagauguuaguaauuuugaugaugaauuuaccucagaagcaccuauucugacuccaccucgagaaccaaggauacuuucggaagaggagcaggaaauguucagagauuuugacuacauugcugauugguguuaa

SEQ ID NO: 9265 - RNA, 2955 nt, Artificial Sequence
  derived and/or modified sequence opt1 from PKN2__Homo_sapiens__AAB33346
auggccagcaaccccgagcgcggcgagauccugcucaccgagcugcagggggacucccggagccugcccuucuccgagaacgugagcgccguccagaagcucgacuucuccgacaccauggugcagcagaagcuggacgacaucaaggaccgcaucaagcgggagauccgcaaggagcugaagaucaaggagggcgcggagaaccuccggaaggugacgaccgacaagaagucccuggccuacgucgacaacauccugaagaaguccaacaagaagcucgaggagcugcaccacaagcugcaggagcucaacgcccacaucguggugagcgaccccgaggacaucaccgacugcccccgcacccccgacacgccgaacaacgacccccggugcuccaccagcaacaaccgccugaaggcccugcagaagcagcucgacaucgagcugaaggucaagcagggggccgagaacaugauccagauguacuccaacggcagcuccaaggaccggaagcugcacgggaccgcgcagcagcuccugcaggacagcaagaccaagaucgaggugauccgcaugcagauccugcaggccgugcagacgaacgagcucgccuucgacaacgccaagcccgucaucagcccccuggagcugcggauggaggagcuccgccaccacuuccggaucgaguucgcgguggccgagggcgccaagaacgugaugaagcugcugggcuccgggaaggucaccgaccgcaaggcccucuccgaggcccaggcgcgguucaacgagagcucccagaagcuggaccugcucaaguacagccuggagcagcgccugaacgaggugccgaagaaccaccccaagagccggaucaucaucgaggagcucucccugguggccgccagccccacccugagcccccgccaguccaugaucuccacccagaaccaguacagcacgcucuccaagccggccgcccugaccggcacccuggagguccggcucauggggugccaggacauccuggagaacgugcccggccgcagcaaggcgaccagcguggcccugcccggguggagccccuccgagacgcggagcuccuucaugagccgcaccuccaagagcaaguccggcagcucccgcaaccuccugaagaccgacgaccugagcaacgacgucugcgccgugcucaagcuggacaacaccguggucggccagacgagcuggaagccgaucuccaaccagagcugggaccagaaguucacccuggagcucgaccggucccgcgagcuggagaucagcguguacuggcgggacuggcgcucccugugcgccgugaaguuccugcggcucgaggacuuccuggacaaccagcgccacgggaugugccuguaccucgagccccagggcacccuguucgccgaggucaccuucuucaaccccgugaucgagcggcgccccaagcugcagcggcagaagaagaucuucagcaagcagcaggggaagacguuccuccgcgcgccgcagaugaacaucaacaucgccaccuggggccggcugguccgccgggccauccccaccgugaaccacuccggcaccuucagcccccaggcccccgugccgacgaccguccccgugguggacguccgcaucccccagcuggcgcccccggccuccgacagcaccgugaccaagcucgacuucgaccuggagcccgagcccccgcccgccccgccccgggccuccagccugggggagaucgacgaguccagcgagcuccgcgugcuggacauccccggccaggacuccgagacggucuucgacauccagaacgaccggaacagcauccugcccaagucccagagcgaguacaagcccgacacgccccagagcgggcucgaguacuccggcauccaggagcuggaggaccgccggagccagcagcgcuuccaguucaaccugcaggacuuccgcugcugcgccgugcucgggcggggccacuucggcaaggugcugcuggcggaguacaagaacaccaacgagauguucgccaucaaggcccucaagaagggggacaucgucgcccgcgacgagguggacucccugaugugcgagaagcggaucuucgagaccgugaacagcguccgccacccguuccuggugaaccucuucgccugcuuccagaccaaggagcacgugugcuucgucauggaguacgcggccggcggggaccugaugaugcacauccacaccgacguguucuccgagccccgggccguguucuacgccgccugcgucgugcugggccuccaguaccugcacgagcacaagaucguguaccgcgaccugaagcucgacaaccugcugcucgacaccgagggguucgucaagaucgcggacuucggccugugcaaggagggcaugggguacggcgaccggaccagcaccuucugcgggacgcccgaguuccuggcccccgaggugcucaccgagaccuccuacacccgcgccguggacugguggggccuggggguccugaucuacgagaugcucgugggcgagagcccguuccccggcgacgacgaggaggagguguucgacuccaucgucaacgacgaggugcgguacccccgcuuccugagcacggaggccaucuccaucaugcggcgccugcuccggcgcaaccccgagcggcgccugggggccagcgagaaggacgcggaggacgugaagaagcacccguucuuccggcugaucgacugguccgcccucauggacaagaaggucaagccgcccuucauccccaccauccgcggccgggaggacgugagcaacuucgacgacgaguucaccuccgaggcccccauccugaccccgccccgcgagccccggauccugagcgaggaggagcaggagauguuccgcgacuucgacuacaucgccgacuggugcuga

SEQ ID NO: 9266 - RNA, 2955 nt, Artificial Sequence
  derived and/or modified sequence opt2 from PKN2__Homo_sapiens__AAB33346
auggccuccaaccccgagcgcggcgagauccuccucaccgagcuccagggcgacucccgcucccuccccuucuccgagaacgucuccgccguccagaagcucgacuucuccgacaccaugguccagcagaagcucgacgacaucaaggaccgcaucaagcgcgagauccgcaaggagcucaagaucaaggagggcgccgagaaccuccgcaaggucaccaccgacaagaagucccucgccuacgucgacaacauccucaagaaguccaacaagaagcucgaggagcuccaccacaagcuccaggagcucaacgcccacaucgucgucuccgaccccgaggacaucaccgacugcccccgcacccccgacacccccaacaacgacccccgcugcuccaccuccaacaaccgccucaaggcccuccagaagcagcucgacaucgagcucaaggucaagcagggcgccgagaacaugauccagauguacuccaacggcuccuccaaggaccgcaagcuccacggcaccgcccagcagcuccuccaggacuccaagaccaagaucgaggucauccgcaugcagauccuccaggccguccagaccaacgagcucgccuucgacaacgccaagcccgucaucuccccccucgagcuccgcauggaggagcuccgccaccacuuccgcaucgaguucgccgucgccgagggcgccaagaacgucaugaagcuccucggcuccggcaaggucaccgaccgcaaggcccucuccgaggcccaggcccgcuucaacgaguccucccagaagcucgaccuccucaaguacucccucgagcagcgccucaacgagguccccaagaaccaccccaagucccgcaucaucaucgaggagcucucccucgucgccgccucccccacccucuccccccgccaguccaugaucuccacccagaaccaguacuccacccucuccaagcccgccgcccucaccggcacccucgagguccgccucaugggcugccaggacauccucgagaacguccccggccgcuccaaggccaccuccgucgcccuccccggcuggucccccuccgagacccgcuccuccuucaugucccgcaccuccaaguccaaguccggcuccucccgcaaccuccucaagaccgacgaccucuccaacgacgucugcgccguccucaagcucgacaacaccgucgucggccagaccuccuggaagcccaucuccaaccaguccugggaccagaaguucacccucgagcucgaccgcucccgcgagcucgagaucuccgucuacuggcgcgacuggcgcucccucugcgccgucaaguuccuccgccucgaggacuuccucgacaaccagcgccacggcaugugccucuaccucgagccccagggcacccucuucgccgaggucaccuucuucaaccccgucaucgagcgccgccccaagcuccagcgccagaagaagaucuucuccaagcagcagggcaagaccuuccuccgcgccccccagaugaacaucaacaucgccaccuggggccgccucguccgccgcgccauccccaccgucaaccacuccggcaccuucuccccccaggcccccguccccaccaccguccccgucgucgacguccgcaucccccagcucgccccccccgccuccgacuccaccgucaccaagcucgacuucgaccucgagcccgagcccccccccgcccccccccgcgccuccucccucggcgagaucgacgaguccuccgagcuccgcguccucgacauccccggccaggacuccgagaccgucuucgacauccagaacgaccgcaacuccauccuccccaagucccaguccgaguacaagcccgacaccccccaguccggccucgaguacuccggcauccaggagcucgaggaccgccgcucccagcagcgcuuccaguucaaccuccaggacuuccgcugcugcgccguccucggccgcggccacuucggcaagguccuccucgccgaguacaagaacaccaacgagauguucgccaucaaggcccucaagaagggcgacaucgucgcccgcgacgaggucgacucccucaugugcgagaagcgcaucuucgagaccgucaacuccguccgccaccccuuccucgucaaccucuucgccugcuuccagaccaaggagcacgucugcuucgucauggaguacgccgccggcggcgaccucaugaugcacauccacaccgacgucuucuccgagccccgcgccgucuucuacgccgccugcgucguccucggccuccaguaccuccacgagcacaagaucgucuaccgcgaccucaagcucgacaaccuccuccucgacaccgagggcuucgucaagaucgccgacuucggccucugcaaggagggcaugggcuacggcgaccgcaccuccaccuucugcggcacccccgaguuccucgcccccgagguccucaccgagaccuccuacacccgcgccgucgacugguggggccucggcguccucaucuacgagaugcucgucggcgagucccccuuccccggcgacgacgaggaggaggucuucgacuccaucgucaacgacgagguccgcuacccccgcuuccucuccaccgaggccaucuccaucaugcgccgccuccuccgccgcaaccccgagcgccgccucggcgccuccgagaaggacgccgaggacgucaagaagcaccccuucuuccgccucaucgacugguccgcccucauggacaagaaggucaagccccccuucauccccaccauccgcggccgcgaggacgucuccaacuucgacgacgaguucaccuccgaggcccccauccucacccccccccgcgagccccgcauccucuccgaggaggagcaggagauguuccgcgacuucgacuacaucgccgacuggugcuga

SEQ ID NO: 9267 - RNA, 2955 nt, Artificial Sequence
  derived and/or modified sequence opt3 from PKN2__Homo_sapiens__AAB33346
auggccagcaaccccgagagaggcgaaauccugcucaccgagcuucagggggacuccaggucucugccuuucucagaaaaugugagugcuguccaaaaguuggauuuuagcgacacaaugguucagcagaaauuagaugacauuaaggaucggauaaaacgcgagauccgaaaggaacugaaaauuaaggagggagcagagaaccuacguaaggugacuacggacaaaaagucccucgccuacguagauaauauccugaaaaagucuaacaaaaagcuggaggaacuucaccauaaguugcaggaacucaaugcgcacauuguggucucggacccagaggauaucaccgacugcccgagaacacccgauacuccuaacaaugacccaagguguucaaccagcaacaaucggcugaaagcucugcaaaagcagcucgauauagaguuaaaagugaagcagggugccgaaaacaugauccagauguauaguaauggcuccucuaaagaccgcaagcugcaugggacagcacaacagcuuuugcaggacagcaaaaccaagauugagguuaucagaaugcagauucugcaagccgugcagacuaacgaacuagcuuucgauaaugcaaagcccgucaucuccccucucgagcugaggauggaggaacuucggcaccauuuucgcauagaguucgccguggcugaaggagccaaaaacguaaugaagcuguugggcucagguaaaguuacagaccgaaaggcgcucagugaggcacaggccagauuuaaugaaagcucucaaaaacuggauuuacugaaguacucccucgagcagaggcuuaacgaagugccaaagaaccaccccaaaucacggauuaucauugaggagcugagcuuggucgcugccaguccuacccuaucuccacgucaguccaugaucagcacgcagaaucaauauucgacucugucuaagccggcagcucucaccgggacacuggaagugcgccuuaugggaugccaggacauccuggagaacgugcccggcagauccaaagccacuucagucgcguugccuggcuggaguccaagcgaaaccagguccucuuucaugagccggacaucaaagaguaaauccgggagcucucgaaaucuccugaagaccgaugacuuaucaaacgauguuugugccgugcugaagcuagacaauacgguagugggacagacuuccuggaaacccauuagcaaccaguccugggaucaaaaguuuacacucgagcuggaccgcucuagagaacuugagauaucggucuacuggagggauuggcggagcuugugcgcagugaaauuccugcgccucgaggacuuucuggacaaucagagacacgguaugugucuuuaucuggaaccucagggcaccuuguucgcugagguuacauuuuucaacccagugaucgaaaggcgucccaagcuccagcggcagaaaaagauuuuuaguaagcaacaggggaaaacuuuccugcgagccccgcagaugaauaucaacauagcuaccuggggaagauuagucaggcgcgccauuccuacggugaaucauucaggcaccuucaguccccaagcaccaguaccuacaacuguucccguggucgaugugcggaucccacagcuggcucccccugccucugacagcaccgucacaaagcuagauuuugaccucgagccagagccgcccccugcgccacccagagcauccucacugggugaaaucgaugagagcucugaacuuaggguguuggacauuccugggcaggauuccgagacuguuuucgacauccaaaacgaucgcaauaguauucugccaaaaagccagucugaauacaagcccgacaccccgcaguccggacucgaguauucaggcauacaggagcuggaagaucgacggagucaacagcguuuucaguucaacuuacaggacuuuagaugcugugccgugcugggcagggggcacuucggaaaaguacuuuuggcugaguacaagaauacaaacgaaauguuugccaucaaagcacucaagaagggugauauugucgcccgcgacgagguggacagccugaugugcgaaaaacggaucuucgagaccguuaacucggugagacauccuuuucuagucaaucuguucgcuuguuuucaaacuaaggagcacgugugcuucguaauggaauacgccgcaggcggggaucucaugaugcacauccauacggacguguuuuccgagccaagggcgguuuucuaugcugccugugucgugcugggacuucaguacuugcacgaacauaaaauuguguaucgagaucugaaguuagacaaccuccugcuugauacagagggcuucgucaaaauagcagacuuuggucugugcaaggaagggaugggcuacggagaucgcaccucuacuuucugcggcacccccgaguuuuuggccccugagguucucacagaaaccagcuauacucgggcuguggacuggugggggcugggagugcuaaucuacgagaugcugguaggugaaucacccuucccaggcgaugacgaggaggaagucuuugauaguauugugaaugacgagguuagauauccuagguuccucuccacagaagccaucucuauuaugcgucgccugcuucggagaaaccccgagaggcgauugggggcaagcgaaaaggaugcugaggacgugaaaaagcacccauuuuuccggcugaucgacugguccgccuuaauggauaaaaaggucaaaccgccuuuuauacccacgauccgcggaagagaggacgugucaaauuucgaugacgaauuuaccagcgaggcgccaauucucacucccccuagggaaccacggauccugagugaggaggaacaggagauguuccgagauuuugacuacauugccgauugguguuga

SEQ ID NO: 9268 - RNA, 2955 nt, Artificial Sequence
  derived and/or modified sequence opt4 from PKN2__Homo_sapiens__AAB33346
auggccagcaaccccgagagaggcgagauccugcugaccgagcugcagggcgacagcagaagccugcccuucagcgagaacgugagcgccgugcagaagcuggacuucagcgacaccauggugcagcagaagcuggacgacaucaaggacagaaucaagagagagaucagaaaggagcugaagaucaaggagggcgccgagaaccugagaaaggugaccaccgacaagaagagccuggccuacguggacaacauccugaagaagagcaacaagaagcuggaggagcugcaccacaagcugcaggagcugaacgcccacaucguggugagcgaccccgaggacaucaccgacugccccagaacccccgacacccccaacaacgaccccagaugcagcaccagcaacaacagacugaaggcccugcagaagcagcuggacaucgagcugaaggugaagcagggcgccgagaacaugauccagauguacagcaacggcagcagcaaggacagaaagcugcacggcaccgcccagcagcugcugcaggacagcaagaccaagaucgaggugaucagaaugcagauccugcaggccgugcagaccaacgagcuggccuucgacaacgccaagcccgugaucagcccccuggagcugagaauggaggagcugagacaccacuucagaaucgaguucgccguggccgagggcgccaagaacgugaugaagcugcugggcagcggcaaggugaccgacagaaaggcccugagcgaggcccaggccagauucaacgagagcagccagaagcuggaccugcugaaguacagccuggagcagagacugaacgaggugcccaagaaccaccccaagagcagaaucaucaucgaggagcugagccugguggccgccagccccacccugagccccagacagagcaugaucagcacccagaaccaguacagcacccugagcaagcccgccgcccugaccggcacccuggaggugagacugaugggcugccaggacauccuggagaacgugcccggcagaagcaaggccaccagcguggcccugcccggcuggagccccagcgagaccagaagcagcuucaugagcagaaccagcaagagcaagagcggcagcagcagaaaccugcugaagaccgacgaccugagcaacgacgugugcgccgugcugaagcuggacaacaccguggugggccagaccagcuggaagcccaucagcaaccagagcugggaccagaaguucacccuggagcuggacagaagcagagagcuggagaucagcguguacuggagagacuggagaagccugugcgccgugaaguuccugagacuggaggacuuccuggacaaccagagacacggcaugugccuguaccuggagccccagggcacccuguucgccgaggugaccuucuucaaccccgugaucgagagaagacccaagcugcagagacagaagaagaucuucagcaagcagcagggcaagaccuuccugagagccccccagaugaacaucaacaucgccaccuggggcagacuggugagaagagccauccccaccgugaaccacagcggcaccuucagcccccaggcccccgugcccaccaccgugcccgugguggacgugagaaucccccagcuggccccccccgccagcgacagcaccgugaccaagcuggacuucgaccuggagcccgagcccccccccgccccccccagagccagcagccugggcgagaucgacgagagcagcgagcugagagugcuggacauccccggccaggacagcgagaccguguucgacauccagaacgacagaaacagcauccugcccaagagccagagcgaguacaagcccgacaccccccagagcggccuggaguacagcggcauccaggagcuggaggacagaagaagccagcagagauuccaguucaaccugcaggacuucagaugcugcgccgugcugggcagaggccacuucggcaaggugcugcuggccgaguacaagaacaccaacgagauguucgccaucaaggcccugaagaagggcgacaucguggccagagacgagguggacagccugaugugcgagaagagaaucuucgagaccgugaacagcgugagacaccccuuccuggugaaccuguucgccugcuuccagaccaaggagcacgugugcuucgugauggaguacgccgccggcggcgaccugaugaugcacauccacaccgacguguucagcgagcccagagccguguucuacgccgccugcguggugcugggccugcaguaccugcacgagcacaagaucguguacagagaccugaagcuggacaaccugcugcuggacaccgagggcuucgugaagaucgccgacuucggccugugcaaggagggcaugggcuacggcgacagaaccagcaccuucugcggcacccccgaguuccuggcccccgaggugcugaccgagaccagcuacaccagagccguggacugguggggccugggcgugcugaucuacgagaugcuggugggcgagagccccuuccccggcgacgacgaggaggagguguucgacagcaucgugaacgacgaggugagauaccccagauuccugagcaccgaggccaucagcaucaugagaagacugcugagaagaaaccccgagagaagacugggcgccagcgagaaggacgccgaggacgugaagaagcaccccuucuucagacugaucgacuggagcgcccugauggacaagaaggugaagccccccuucauccccaccaucagaggcagagaggacgugagcaacuucgacgacgaguucaccagcgaggcccccauccugaccccccccagagagcccagaauccugagcgaggaggagcaggagauguucagagacuucgacuacaucgccgacuggugcuga

SEQ ID NO: 9269 - RNA, 2955 nt, Artificial Sequence
  derived and/or modified sequence opt5 from PKN2__Homo_sapiens__AAB33346
auggccagcaaccccgagagaggcgaaauccugcucaccgagcugcagggggacucccggucucuuccuuucagcgaaaauguguccgcuguccaaaagcuggauuuuucugacacaaugguucagcagaaacucgaugacauuaaggaucgcaucaaaagagagauucggaaggaacugaaaaucaaggagggagccgagaaccuucgcaaggugacgaccgacaaaaagagccuggcguacguggauaauauucucaaaaaguccaacaaaaagcuggaggaacugcaccauaagcuccaggaacugaaugcucacaucgucgugucugacccggaggauaucacagacugccccagaaccccugauacacccaacaaugacccucgguguagcaccuccaacaaucgccuuaaagcccugcaaaagcagcucgauauugagcugaaaguuaagcagggcgccgaaaacaugauccagauguauagcaaugggucuuccaaagacagaaaacuucauggaacagcucaacagcugcuccaggacagcaaaaccaagauugaggugauccggaugcagauucugcaagccguccagacgaacgaacuggcuuucgauaaugccaagcccgugaucucuccucucgagcugcgcauggaggaacuuagacaccauuuucggauugaguucgcgguugccgaaggcgcuaaaaacgugaugaagcugcucggguccggaaaagucaccgaccgcaaggcccugagcgaggcucaggccagauuuaaugaaucuucccaaaaacuugaucugcucaaguacagccuggagcagcggcugaacgaagugccgaagaaccaccccaaaucccgcaucaucauugaggagcucucucugguggcggccagcccuacacuuucccccagacagagcaugaucucuacccagaaucaauauuccacacugagcaagccugcugcccucaccggcacgcuggaaguccggcuuaugggcugccaggacauucuggagaacguucccgggagaucuaaagcuacaagcguggcccucccgggaugguccccuucugaaacccgcagcuccuucaugagccggacaucuaaguccaaaagcgggucuuccagaaaucugcugaagaccgaugaccucagcaacgaugugugugccguccugaaacuugacaauaccgugguuggccagacauccuggaagcccaucucuaaccagagcugggaucaaaaguuuacgcuggagcucgaccgcucccgggaacuggagauuucuguguacuggagagauuggcgcagccugugcgcugucaaauuccuucggcucgaggacuuucuggacaaucagagacacggaaugugucuguaucucgaaccucagggcacccuguucgcggaggugacauuuuucaaccccguuaucgaacgccggcccaaacuucagagacaaaagaagaucuuuuccaagcagcaggggaagaccuuccugcgcgccccucagaugaauauuaacaucgcuacauggggacggcucgugagacgggccauuccgaccgucaaucauagcggcacguucucuccccaagccccugugcccacaaccgucccugugguugaugugcgcaucccccagcuggcuccgccugccuccgacagcaccgucacaaagcuggauuuugaccuugagcccgagccucccccugcgcccccgagagcuucuucccucggcgaaauugaugagagcucugaacugcgggugcuggacaucccugggcaggauagcgagaccguuuucgacauccaaaacgauagaaauuccauucuccccaaaagccagucugaauacaagcccgacacaccucaguccggacuggaguauagcggcauccaggagcuugaagaucgccggucccaacagagauuucaguucaaccugcaggacuuucgcugcugugccgugcucgggagaggacacuucggcaaaguccugcuggccgaguacaagaauacgaacgaaauguuugcuauuaaagcccuuaagaagggggauaucguggcucgggacgagguggacucucucaugugcgaaaaacgcauuuucgagaccguuaacagcgucagacauccguuucuggugaaucuguucgccuguuuucaaacaaaggagcacgugugcuucgucauggaauacgcggccggaggcgaucucaugaugcacauccauaccgacguguuuuccgagccccgggcuguuuucuaugccgcuugugugguccugggccuucaguaccugcacgaacauaaaauuguguaucgcgaucucaagcuggacaaccugcuucucgauacagagggguucguuaaaaucgccgacuuuggacugugcaaggaaggcaugggguacggagauagaaccucuacguucugcggcaccccugaguuucuggcgcccgaggugcucacagaaaccagcuauacacgggccgucgacuggugggggcugggcgugcuuaucuacgagaugcugguuggagaauccccuuuccccggcgaugacgaggaggaaguguuugauucuauugucaaugacgaggugcgcuauccuagauuccucagcaccgaagcuaucuccauuaugcggcgccugcugagacggaaccccgagagacgccuuggggccagcgaaaaggaugcugaggacgugaaaaagcacccguuuuuccggcugaucgacuggucugcccucauggauaaaaaggucaaaccucccuuuauuccuacgaucagaggacgcgaggacguuuccaauuucgaugacgaauuuacaagcgaggcccccauccugaccccgccucgggaaccccgcauucucucugaggaggaacaggagauguucagagauuuugacuacaucgcugauugguguuga

SEQ ID NO: 9270 - protein, 889 aa, Artificial Sequence
  PKN3__Homo_sapiens__Q6P5Z2
MEEGAPRQPGPSQWPPEDEKEVIRRAIQKELKIKEGVENLRRVATDRRHLGHVQQLLRSSNRRLEQLHGELRELHARILLPGPGPGPAEPVASGPRPWAEQLRARHLEALRRQLHVELKVKQGAENMTHTCASGTPKERKLLAAAQQMLRDSQLKVALLRMKISSLEASGSPEPGPELLAEELQHRLHVEAAVAEGAKNVVKLLSSRRTQDRKALAEAQAQLQESSQKLDLLRLALEQLLEQLPPAHPLRSRVTRELRAAVPGYPQPSGTPVKPTALTGTLQVRLLGCEQLLTAVPGRSPAAALASSPSEGWLRTKAKHQRGRGELASEVLAVLKVDNRVVGQTGWGQVAEQSWDQTFVIPLERARELEIGVHWRDWRQLCGVAFLRLEDFLDNACHQLSLSLVPQGLLFAQVTFCDPVIERRPRLQRQERIFSKRRGQDFLRASQMNLGMAAWGRLVMNLLPPCSSPSTISPPKGCPRTPTTLREASDPATPSNFLPKKTPLGEEMTPPPKPPRLYLPQEPTSEETPRTKRPHMEPRTRRGPSPPASPTRKPPRLQDFRCLAVLGRGHFGKVLLVQFKGTGKYYAIKALKKQEVLSRDEIESLYCEKRILEAVGCTGHPFLLSLLACFQTSSHACFVTEFVPGGDLMMQIHEDVFPEPQARFYVACVVLGLQFLHEKKIIYRDLKLDNLLLDAQGFLKIADFGLCKEGIGFGDRTSTFCGTPEFLAPEVLTQEAYTRAVDWWGLGVLLYEMLVGECPFPGDTEEEVFDCIVNMDAPYPGFLSVQGLEFIQKLLQKCPEKRLGAGEQDAEEIKVQPFFRTTNWQALLARTIQPPFVPTLCGPADLRYFEGEFTGLPPALTPPAPHSLLTARQQAAFRDFDFVSERFLEP

SEQ ID NO: 9271 - RNA, 2670 nt, Artificial Sequence
  PKN3__Homo_sapiens__AAH62558
auggaggagggggcgccgcggcagccugggccgagccaguggcccccagaggaugagaaggaggugauccgccgggccauccagaaagagcugaagaucaaggaggggguggagaaccugcggcgcguggccacagaccgccgccacuugggccaugugcagcagcugcugcgguccuccaaccgccgccuggagcagcugcauggcgagcugcgggagcugcacgcccgaauccugcugcccggcccugggccuggcccagcugagccuguggccucaggaccccggccgugggcagagcagcucagggcucggcaccuagaggcucuccggaggcagcugcauguggagcugaaggugaagcagggggcugagaacaugacccacacgugcgccaguggcacccccaaggagaggaagcuccuggcagcugcccagcagaugcugcgggacagccagcugaagguggcccugcugcggaugaagaucagcagccuggaggccaguggguccccggagccagggccugagcugcuggcggaggagcuacagcaucgacugcacguugaggcagcuguggcugagggcgccaagaacguggugaaacugcuuaguagccggagaacacaggaccgcaaggcacuggcugaggcccaggcccagcuacaggaguccucucagaaacuggaccuccugcgccuggccuuggagcagcugcuggagcaacugccuccugcccacccuuugcgcagcagagugacccgagaguugcgggcugcggugccuggauacccccagccuucagggacaccugugaagcccaccgcccuaacagggacacugcagguccgccuccugggcugugaacaguugcugacagccgugccugggcgcuccccagcggccgcacuggccagcagccccuccgagggcuggcuucggaccaaggccaagcaccagcguggccgaggcgagcuugccagcgaggugcuggcugugcuaaagguggacaaccguguuguggggcagacgggcugggggcagguggccgaacaguccugggaccagaccuuugucaucccacuggagcgagcccgugagcuggagauugggguacacuggcgggacuggcggcagcuauguggcguggccuuccugagacuugaggacuuccuggacaaugccugucaccaacugucccucagccugguaccgcagggacugcuuuuugcccaggugaccuucugcgauccugucauugagaggcggccccggcugcagaggcaggaacgcaucuucucuaaacgcagaggccaggacuuccugagggcuucgcagaugaaccucggcauggcggccugggggcgccucgucaugaaccugcugccccccugcagcuccccgagcacaaucagccccccuaaaggaugcccucggaccccaacaacacugcgagaggccucugacccugccacucccaguaauuuccugcccaagaagacccccuugggugaagagaugacacccccacccaagcccccacgccucuaccucccccaggagccaacauccgaggagacuccgcgcaccaaacguccccauauggagccuaggacucgacgugggccaucuccaccagccucccccaccaggaaacccccucggcuucaggacuuccgcugcuuagcugugcugggccggggacacuuugggaagguccuccugguccaguucaaggggacagggaaauacuacgccaucaaagcacugaagaagcaggaggugcucagccgggacgagauagagagccuguacugcgagaagcggauccuggaggcugugggcugcacagggcacccuuuccugcucucccuccuugccugcuuccagaccuccagccaugccugcuuugugacugaguuugugccugguggugaccucaugaugcagauccacgaggaugucuuccccgagccccaggcccgcuucuacguggcuuguguuguccuggggcugcaguucuuacacgagaagaagaucauuuacagggaccugaaguuggauaaccuucugcuggaugcccagggauuccugaagaucgcagacuuuggacucugcaaggaagggaucggcuucggggaccggacuagcaccuucuguggcaccccggaguuccuggcucccgaggugcugacccaggaggcauacacacgggcuguggacuggugggggcugggugugcugcucuacgagaugcuggugggugagugcccguucccaggggacacagaggaagagguguuugacugcaucgucaacauggacgcccccuaccccggcuuucugucggugcaagggcuugaguucauucagaagcuccuccagaagugcccggagaagcgccucggggcaggugagcaggaugccgaggagaucaagguccagccauucuucaggaccaccaacuggcaagcccugcucgcccgcaccauccagccccccuucgugccuacccuguguggcccugcggaccugcgcuacuuugagggcgaguucacagggcugccgccugcccugaccccaccugcaccccacagccuccucacugcccgccaacaggccgccuuccgggacuucgacuuugugucagagcgauuccuggaacccuga

SEQ ID NO: 9272 - RNA, 2670 nt, Artificial Sequence
  derived and/or modified sequence opt1 from PKN3__Homo_sapiens__AAH62558
auggaggagggcgcgccccgccagccggggcccagccaguggccgcccgaggacgagaaggaggugauccggcgcgccauccagaaggagcugaagaucaaggagggcgucgagaaccuccggcgcguggccaccgaccggcgccaccuggggcacgugcagcagcugcuccgguccagcaaccgccggcuggagcagcugcacggcgagcuccgcgagcugcacgcccggauccugcucccggggcccggccccggccccgccgagccggucgccuccgggccccgccccugggccgagcagcugcgggcgcgccaccuggaggcccuccggcgccagcugcacguggagcugaaggugaagcagggcgccgagaacaugacccacacgugcgccagcgggacccccaaggagcggaagcuccuggcggccgcccagcagaugcugcgcgacucccagcucaaggucgcccugcugcggaugaagaucagcucccucgaggccagcggcuccccggagcccgggcccgagcugcuggcggaggagcuccagcaccgccugcacguggaggccgccguggccgagggcgccaagaacgucgugaagcugcucagcucccggcgcacccaggaccgcaaggcgcuggccgaggcccaggcccagcugcaggagagcucccagaagcucgaccugcugcggcucgcccuggagcagcugcucgagcagcugcccccggcgcacccccugcgcagccgggugacccgcgagcuccgggccgccguccccggcuacccccagccguccgggacgcccgugaagcccaccgcccugaccggcacccuccaggugcgccuccuggggugcgagcagcugcucacggccguccccggccggagcccggcggccgcccuggccuccagccccuccgagggcuggcugcgcaccaaggcgaagcaccagcgggggcgcggcgagcucgccagcgaggugcuggccgugcugaaggucgacaaccgggugguggggcagaccggcugggggcaggucgccgagcagagcugggaccagaccuucgugaucccccuggagcgcgcccgggagcucgagaucggcgugcacuggcgcgacuggcggcagcugugcggcgucgcguuccugcgccucgaggacuuccuggacaacgccugccaccagcugucccucagccuggugccccaggggcuccucuucgcccaggucacguucugcgacccggugaucgagcggcgcccccggcugcagcgccaggagcgcaucuucuccaagcggcgcggccaggacuuccugcgggccagccagaugaaccucgggauggccgcguggggccgccuggugaugaaccugcugcccccgugcuccagccccuccaccaucagcccgcccaaggggugcccccggacccccaccacgcugcgcgaggccuccgaccccgccacccccagcaacuuccugccgaagaagacgccccucggcgaggagaugaccccgccgcccaagccgccccggcuguaccugccccaggagcccaccuccgaggagacgccccgcaccaagcggccccacauggagccccgcacccggcgcggccccagcccgcccgccucccccacccggaagccgccccgccuccaggacuuccggugccuggccguccuggggcgcggccacuucgggaaggugcuccuggugcaguucaagggcaccgggaaguacuacgcgaucaaggcccugaagaagcaggagguccucagccgggacgagaucgagucccuguacugcgagaagcgcauccuggaggccgugggcugcaccggccaccccuuccuccugagccugcucgccugcuuccagaccuccagccacgcgugcuucgugacggaguucguccccgggggcgaccugaugaugcagauccacgaggacguguuccccgagccccaggcccgguucuacguggccugcgucgugcuggggcuccaguuccugcacgagaagaagaucaucuaccgcgaccugaagcucgacaaccugcugcucgacgcccagggcuuccugaagaucgccgacuucggccugugcaaggaggggaucggcuucggggaccggaccuccaccuucugcggcacccccgaguuccucgcgcccgaggugcugacgcaggaggccuacacccgcgccgucgacuggugggggcugggcgugcuccuguacgagaugcuggugggcgagugccccuuccccggggacaccgaggaggaggucuucgacugcaucgugaacauggacgcccccuacccgggcuuccucagcgugcaggggcuggaguucauccagaagcugcuccagaagugccccgagaagcgccugggcgccggggagcaggacgcggaggagaucaagguccagcccuucuuccggaccacgaacuggcaggcccugcucgcccgcaccauccagcccccguucgugcccacccugugcggccccgccgaccugcgguacuucgagggcgaguucaccgggcugcccccggcccugaccccgcccgcgccccacagccugcucacggcccgccagcaggccgccuuccgggacuucgacuucguguccgagcgcuuccuggagcccuga

SEQ ID NO: 9273 - RNA, 2670 nt, Artificial Sequence
  derived and/or modified sequence opt2 from PKN3__Homo_sapiens__AAH62558
auggaggagggcgccccccgccagcccggccccucccaguggccccccgaggacgagaaggaggucauccgccgcgccauccagaaggagcucaagaucaaggagggcgucgagaaccuccgccgcgucgccaccgaccgccgccaccucggccacguccagcagcuccuccgcuccuccaaccgccgccucgagcagcuccacggcgagcuccgcgagcuccacgcccgcauccuccuccccggccccggccccggccccgccgagcccgucgccuccggcccccgccccugggccgagcagcuccgcgcccgccaccucgaggcccuccgccgccagcuccacgucgagcucaaggucaagcagggcgccgagaacaugacccacaccugcgccuccggcacccccaaggagcgcaagcuccucgccgccgcccagcagaugcuccgcgacucccagcucaaggucgcccuccuccgcaugaagaucuccucccucgaggccuccggcucccccgagcccggccccgagcuccucgccgaggagcuccagcaccgccuccacgucgaggccgccgucgccgagggcgccaagaacgucgucaagcuccucuccucccgccgcacccaggaccgcaaggcccucgccgaggcccaggcccagcuccaggaguccucccagaagcucgaccuccuccgccucgcccucgagcagcuccucgagcagcucccccccgcccacccccuccgcucccgcgucacccgcgagcuccgcgccgccguccccggcuacccccagcccuccggcacccccgucaagcccaccgcccucaccggcacccuccagguccgccuccucggcugcgagcagcuccucaccgccguccccggccgcucccccgccgccgcccucgccuccucccccuccgagggcuggcuccgcaccaaggccaagcaccagcgcggccgcggcgagcucgccuccgagguccucgccguccucaaggucgacaaccgcgucgucggccagaccggcuggggccaggucgccgagcaguccugggaccagaccuucgucaucccccucgagcgcgcccgcgagcucgagaucggcguccacuggcgcgacuggcgccagcucugcggcgucgccuuccuccgccucgaggacuuccucgacaacgccugccaccagcucucccucucccucgucccccagggccuccucuucgcccaggucaccuucugcgaccccgucaucgagcgccgcccccgccuccagcgccaggagcgcaucuucuccaagcgccgcggccaggacuuccuccgcgccucccagaugaaccucggcauggccgccuggggccgccucgucaugaaccuccucccccccugcuccucccccuccaccaucuccccccccaagggcugcccccgcacccccaccacccuccgcgaggccuccgaccccgccacccccuccaacuuccuccccaagaagaccccccucggcgaggagaugacccccccccccaagcccccccgccucuaccucccccaggagcccaccuccgaggagaccccccgcaccaagcgcccccacauggagccccgcacccgccgcggccccuccccccccgccucccccacccgcaagcccccccgccuccaggacuuccgcugccucgccguccucggccgcggccacuucggcaagguccuccucguccaguucaagggcaccggcaaguacuacgccaucaaggcccucaagaagcaggagguccucucccgcgacgagaucgagucccucuacugcgagaagcgcauccucgaggccgucggcugcaccggccaccccuuccuccucucccuccucgccugcuuccagaccuccucccacgccugcuucgucaccgaguucguccccggcggcgaccucaugaugcagauccacgaggacgucuuccccgagccccaggcccgcuucuacgucgccugcgucguccucggccuccaguuccuccacgagaagaagaucaucuaccgcgaccucaagcucgacaaccuccuccucgacgcccagggcuuccucaagaucgccgacuucggccucugcaaggagggcaucggcuucggcgaccgcaccuccaccuucugcggcacccccgaguuccucgcccccgagguccucacccaggaggccuacacccgcgccgucgacugguggggccucggcguccuccucuacgagaugcucgucggcgagugccccuuccccggcgacaccgaggaggaggucuucgacugcaucgucaacauggacgcccccuaccccggcuuccucuccguccagggccucgaguucauccagaagcuccuccagaagugccccgagaagcgccucggcgccggcgagcaggacgccgaggagaucaagguccagcccuucuuccgcaccaccaacuggcaggcccuccucgcccgcaccauccagccccccuucguccccacccucugcggccccgccgaccuccgcuacuucgagggcgaguucaccggccucccccccgcccucaccccccccgccccccacucccuccucaccgcccgccagcaggccgccuuccgcgacuucgacuucgucuccgagcgcuuccucgagcccuga

SEQ ID NO: 9274 - RNA, 2670 nt, Artificial Sequence
  derived and/or modified sequence opt3 from PKN3__Homo_sapiens__AAH62558
auggaggaaggcgcccccagacagccugggccaagccaauggccgcccgaggacgaaaaggaggugaucaggcgggcuauucagaaagaacugaagauaaaagagggagucgagaaccuccgccgaguugcaaccgaucguagacaccuuggucaugugcagcagcuguugagguccucuaaucggcgcuuagaacaacugcacggcgagcuaagagaacuccaugccaggauccugcuuccugggccaggacccggcccugcggagccaguagcuucagguccccggccuugggccgagcagcugcgcgcacgacacuuggaagcccucagaaggcagcugcauguggagcugaaggucaaacagggggcugaaaacaugacacacacuugcgcaaguggaacgccaaaggagcggaagcucuuagccgcugcccaacagaugcugcgugacagccagcuuaaaguggcguugcugcgcaugaagauuuccucucuagaagcaucgggcucaccggagcccggcccugagcuccuggccgaagaguugcagcacagacugcauguugaagcugccguggcagagggggcuaaaaaugucgugaaguugcucagcaguaggcggacccaagaucgaaaagcccuggcggaagcccaggcacaguuacaagaguccucucagaagcuggaccuccuucgccuggcuuuggagcagcuacuggaacagcucccacccgcccacccucugagaagcaggguaacacgggagcuucgcgcugccguuccaggauacccccaaccguccgguacuccugugaagcccaccgcacugacaggcaccuugcaggucagacuccuggggugugaacaguuacugacugccgugccaggaagguccccugcugcggcacuagccaguagccccucugagggcuggcuccguacaaaagcuaagcaucagcggggucgaggggaacuggccuccgaggugcuugcagucuugaaaguugauaacagagugguaggacaaaccggcuggggccagguggccgagcagucaugggaccagacguucgucaucccacuggaaagggcucgcgagcucgaaauuggggugcacuggcgggauuggagacaacugugcggaguugccuuucuuaggcuggaggacuucuuggauaaugcaugucaccagcucagccugaguuuagugccccagggucugcuauuugcgcaggucacuuucugcgacccugugaucgagcgccgaccacggcuccaacgucaggaaagaauauuuucuaagaggcgcggccaggauuuccugcgggcuucccaaaugaaccuugggauggccgcauggggaagauugguaaugaaucugcucccgcccuguagcucgccuucuaccaucuccccacccaaaggcugcccuaggacaccaacuacccugcgagaggccucagaccccgcuacaccgaguaacuuuuuaccuaagaaaaccccacugggugaagagaugacgcccccucccaagccaccucgccuuuauuugccccaggaaccaacuagcgaggagacaccgcggaccaagagaccucauauggaacccaggacucgucgcgggccaucacccccugccucuccaacacggaaacccccuagacuccaggauuucaggugucuggcaguucuaggccgaggacacuuuggcaaggugcugcucguccaguucaaagggaccggaaaguacuaugcuauuaaagcccugaagaagcaagaggugcuuagccgggacgaaaucgagucauuguacugcgaaaaacgcauucuggaggcggucgguuguacgggccauccguuuuuacucagucugcuugccugcuuccagaccuccagccacgcuuguuuugugacagaguucguuccagggggagaccugaugaugcagauccaugaagauguguuccccgagccucaggcaagauuuuauguagccugcgucguguugggccuccaauuccugcacgaaaagaaaauaauuuacagggaccuaaagcuggauaaucuccugcuugacgcucaggguuuucuuaaaaucgccgauuucgggcugugcaaggagggcauuggauuuggcgaccggacuucuaccuucugugggacaccagaauuuuuagcacccgagguucucacucaggaggcguauacccgagccguggauugguggggacuggguguccuucuguacgaaaugcuagugggcgagugcccuuucccgggggacacagaagaggagguauuugauuguaucgugaacauggacgcucccuacccaggauuccucucaguucagggccuggaauuuauccaaaaguugcugcagaaaugcccugagaagagauuaggugccggggaacaggaugcagaggaaauuaaaguccaacccuucuuucgcaccacuaauuggcaggcucuccuggccaggacgauacagccaccuuucgugcccacacuuuguggcccagcagaccugcguuauuucgagggagaguuuaccggcuugccgccugcccucacucccccagcuccccacagucugcuaaccgcgcggcagcaagccgcauucagagacuuugauuucgugagcgaaagguuucuggagccuuga

SEQ ID NO: 9275 - RNA, 2670 nt, Artificial Sequence
  derived and/or modified sequence opt4 from PKN3__Homo_sapiens__AAH62558
auggaggagggcgcccccagacagcccggccccagccaguggccccccgaggacgagaaggaggugaucagaagagccauccagaaggagcugaagaucaaggagggcguggagaaccugagaagaguggccaccgacagaagacaccugggccacgugcagcagcugcugagaagcagcaacagaagacuggagcagcugcacggcgagcugagagagcugcacgccagaauccugcugcccggccccggccccggccccgccgagcccguggccagcggccccagacccugggccgagcagcugagagccagacaccuggaggcccugagaagacagcugcacguggagcugaaggugaagcagggcgccgagaacaugacccacaccugcgccagcggcacccccaaggagagaaagcugcuggccgccgcccagcagaugcugagagacagccagcugaagguggcccugcugagaaugaagaucagcagccuggaggccagcggcagccccgagcccggccccgagcugcuggccgaggagcugcagcacagacugcacguggaggccgccguggccgagggcgccaagaacguggugaagcugcugagcagcagaagaacccaggacagaaaggcccuggccgaggcccaggcccagcugcaggagagcagccagaagcuggaccugcugagacuggcccuggagcagcugcuggagcagcugccccccgcccacccccugagaagcagagugaccagagagcugagagccgccgugcccggcuacccccagcccagcggcacccccgugaagcccaccgcccugaccggcacccugcaggugagacugcugggcugcgagcagcugcugaccgccgugcccggcagaagccccgccgccgcccuggccagcagccccagcgagggcuggcugagaaccaaggccaagcaccagagaggcagaggcgagcuggccagcgaggugcuggccgugcugaagguggacaacagaguggugggccagaccggcuggggccagguggccgagcagagcugggaccagaccuucgugaucccccuggagagagccagagagcuggagaucggcgugcacuggagagacuggagacagcugugcggcguggccuuccugagacuggaggacuuccuggacaacgccugccaccagcugagccugagccuggugccccagggccugcuguucgcccaggugaccuucugcgaccccgugaucgagagaagacccagacugcagagacaggagagaaucuucagcaagagaagaggccaggacuuccugagagccagccagaugaaccugggcauggccgccuggggcagacuggugaugaaccugcugccccccugcagcagccccagcaccaucagcccccccaagggcugccccagaacccccaccacccugagagaggccagcgaccccgccacccccagcaacuuccugcccaagaagaccccccugggcgaggagaugacccccccccccaagccccccagacuguaccugccccaggagcccaccagcgaggagacccccagaaccaagagaccccacauggagcccagaaccagaagaggccccagcccccccgccagccccaccagaaagccccccagacugcaggacuucagaugccuggccgugcugggcagaggccacuucggcaaggugcugcuggugcaguucaagggcaccggcaaguacuacgccaucaaggcccugaagaagcaggaggugcugagcagagacgagaucgagagccuguacugcgagaagagaauccuggaggccgugggcugcaccggccaccccuuccugcugagccugcuggccugcuuccagaccagcagccacgccugcuucgugaccgaguucgugcccggcggcgaccugaugaugcagauccacgaggacguguuccccgagccccaggccagauucuacguggccugcguggugcugggccugcaguuccugcacgagaagaagaucaucuacagagaccugaagcuggacaaccugcugcuggacgcccagggcuuccugaagaucgccgacuucggccugugcaaggagggcaucggcuucggcgacagaaccagcaccuucugcggcacccccgaguuccuggcccccgaggugcugacccaggaggccuacaccagagccguggacugguggggccugggcgugcugcuguacgagaugcuggugggcgagugccccuuccccggcgacaccgaggaggagguguucgacugcaucgugaacauggacgcccccuaccccggcuuccugagcgugcagggccuggaguucauccagaagcugcugcagaagugccccgagaagagacugggcgccggcgagcaggacgccgaggagaucaaggugcagcccuucuucagaaccaccaacuggcaggcccugcuggccagaaccauccagccccccuucgugcccacccugugcggccccgccgaccugagauacuucgagggcgaguucaccggccugccccccgcccugaccccccccgccccccacagccugcugaccgccagacagcaggccgccuucagagacuucgacuucgugagcgagagauuccuggagcccuga

SEQ ID NO: 9276 - RNA, 2670 nt, Artificial Sequence
  derived and/or modified sequence opt5 from PKN3__Homo_sapiens__AAH62558
auggaggaaggcgcccccagacagccugggccgagccaauggcccccugaggacgaaaaggaggugauccggcgcgcuauucagaaagaacugaagaucaaagagggagucgagaaccucagacggguugccaccgaucgcagacaccugggccaugugcagcagcuucugcgguccucuaaucgcagacucgaacaacugcacggggagcuucgggaacugcaugcgcgcauucuccugcccggaccuggccccgggccugcugagccgguggccagcggacccagaccuugggccgagcagcugcgggcucgccaccucgaagcccugagacggcagcuucaugucgagcugaaggugaaacagggcgcugaaaacaugacacacacgugcgccuccggcacccccaaggagcgcaagcuccuggcggccgcucaacagaugcuuagagacucucagcugaaaguugcccuccugcggaugaagaucagcucccuggaagccucugggagcccugagcccggaccggagcuccuggccgaggaacuucagcacagacugcauguggaagcggccgucgcugagggcgccaaaaaugugguuaagcuccuguccagccgccggacacaagauagaaaagcucuugccgaagcccaggcucagcugcaagagucuucccagaagcucgaccugcugcgccucgcgcuggagcagcuucuggaacagcucccucccgcccacccucugcggagcagagugacccgcgagcuucgggcugccguccccggguacccccaaccuucuggaacaccggugaagcccaccgcccugacaggcacccuccaggugagacugcuggggugugaacagcuccugacggcugucccuggacgcucccccgccgcggcucuugccagcucuccuuccgagggcuggcugcggaccaaagccaagcaucagagaggccgcggggaacucgcuagcgagguucuggccgugcugaaaguggauaaccgggucgugggacaaacaggcugggggcagguugcugagcaguccugggaccagaccuucgugauuccccuugaaagagcccgggagcucgaaaucggaguccacuggcgcgauuggagacaacugugcggcguggcguuucugcggcucgaggacuuccuggauaaugccugucaccagcuuucucugagccucguuccgcaggggcugcuguuugcucaggugacauucugcgacccugucaucgagagacgcccccggcuucaaagacaggaacgcaucuuuuccaagagacggggacaggauuuccuccgcgccagccaaaugaaccugggcauggcugccuggggcagacuggugaugaaucuccugccucccuguucuuccccuagcaccauuucucccccgaaagggugcccucggacgcccacaacccuucgcgaggcgagcgaccccgccacaccuuccaacuuucugccgaagaaaacaccccucggagaagagaugaccccucccccuaagcccccuagacuguaucugccccaggaaccgaccucugaggagacgccucggaccaagcgcccccauauggaaccuagaacacggcgcggccccagcccgccugcuucccccaccagaaaaccuccccggcuucaggauuucagaugucucgccguccuggggcgcggacacuuuggcaaggugcugcucguucaguucaaagggacaggcaaguacuaugcuauuaaagcccugaagaagcaagaggugcuuagccgggacgaaaucgagucucuguacugcgaaaaacgcauucucgaggccgucggauguaccggccaucccuuucugcugucccuucucgcuugcuuccagacgagcucucacgcguguuuugugacagaguucguuccugggggagaccugaugaugcagauccaugaagauguguucccggagccccaggccagauuuuaugucgcuugcguggugcugggccuccaauuccugcacgaaaagaaaauuaucuaccgggaccuuaagcuggauaaucuccugcuggacgcccagggguuucuuaaaaucgccgauuucggacugugcaaggagggcauuggguuuggcgacagaaccuccaccuucuguggaacaccugaauuucucgcucccgagguucugacccaggaggccuauacacgcgcggucgauugguggggccucggggugcugcuuuacgaaaugcuggugggagagugcccuuuccccggcgacacggaagaggaggucuuugauuguaucgugaacauggacgcuccuuacccgggguuccucagcguucagggacuggaauuuauucaaaagcugcuucagaaaugccccgagaagcggcugggcgccggggaacaggaugccgaggaaaucaaagugcaaccuuucuuuagaaccacaaauuggcaggcucuccuggcccgcaccauucagcccccuuucguccccacacucuguggcccggcggaccugcgguauuucgagggagaguuuaccggccuuccucccgcucugacgcccccugcuccccacucccuccugaccgccagacagcaagcugccuuccgggacuuugauuucgugucugaacgcuuucuggagccuuga

SEQ ID NO: 9277 - protein, 672 aa, Artificial Sequence
  PRKCA__Homo_sapiens__P17252
MADVFPGNDSTASQDVANRFARKGALRQKNVHEVKDHKFIARFFKQPTFCSHCTDFIWGFGKQGFQCQVCCFVVHKRCHEFVTFSCPGADKGPDTDDPRSKHKFKIHTYGSPTFCDHCGSLLYGLIHQGMKCDTCDMNVHKQCVINVPSLCGMDHTEKRGRIYLKAEVADEKLHVTVRDAKNLIPMDPNGLSDPYVKLKLIPDPKNESKQKTKTIRSTLNPQWNESFTFKLKPSDKDRRLSVEIWDWDRTTRNDFMGSLSFGVSELMKMPASGWYKLLNQEEGEYYNVPIPEGDEEGNMELRQKFEKAKLGPAGNKVISPSEDRKQPSNNLDRVKLTDFNFLMVLGKGSFGKVMLADRKGTEELYAIKILKKDVVIQDDDVECTMVEKRVLALLDKPPFLTQLHSCFQTVDRLYFVMEYVNGGDLMYHIQQVGKFKEPQAVFYAAEISIGLFFLHKRGIIYRDLKLDNVMLDSEGHIKIADFGMCKEHMMDGVTTRTFCGTPDYIAPEIIAYQPYGKSVDWWAYGVLLYEMLAGQPPFDGEDEDELFQSIMEHNVSYPKSLSKEAVSVCKGLMTKHPAKRLGCGPEGERDVREHAFFRRIDWEKLENREIQPPFKPKVCGKGAENFDKFFTRGQPVLTPPDQLVIANIDQSDFEGFSYVNPQFVHPILQSAV

SEQ ID NO: 9278 - RNA, 2019 nt, Artificial Sequence
  PRKCA__Homo_sapiens__CCDS11664.1
auggcugacguuuucccgggcaacgacuccacggcgucucaggacguggccaaccgcuucgcccgcaaaggggcgcugaggcagaagaacgugcacgaggugaaggaccacaaauucaucgcgcgcuucuucaagcagcccaccuucugcagccacugcaccgacuucaucuggggguuugggaaacaaggcuuccagugccaaguuugcuguuuugugguccacaagaggugccaugaauuuguuacuuuuucuuguccgggugcggauaagggacccgacacugaugaccccaggagcaagcacaaguucaaaauccacacuuacggaagccccaccuucugcgaucacugugggucacugcucuauggacuuauccaucaagggaugaaaugugacaccugcgauaugaacguucacaagcaaugcgucaucaauguccccagccucugcggaauggaucacacugagaagagggggcggauuuaccuaaaggcugagguugcugaugaaaagcuccaugucacaguacgagaugcaaaaaaucuaaucccuauggauccaaacgggcuuucagauccuuaugugaagcugaaacuuauuccugaucccaagaaugaaagcaagcaaaaaaccaaaaccauccgcuccacacuaaauccgcaguggaaugaguccuuuacauucaaauugaaaccuucagacaaagaccgacgacugucuguagaaaucugggacugggaucgaacaacaaggaaugacuucaugggaucccuuuccuuuggaguuucggagcugaugaagaugccggccaguggaugguacaaguugcuuaaccaagaagaaggugaguacuacaacguacccauuccggaaggggacgaggaaggaaacauggaacucaggcagaaauucgagaaagccaaacuuggcccugcuggcaacaaagucaucagucccucugaagacaggaaacaaccuuccaacaaccuugaccgagugaaacucacggacuucaauuuccucaugguguugggaaaggggaguuuuggaaaggugaugcuugccgacaggaagggcacagaagaacuguaugcaaucaaaauccugaagaaggauguggugauucaggaugaugacguggagugcaccaugguagaaaagcgagucuuggcccugcuugacaaacccccguucuugacgcagcugcacuccugcuuccagacaguggaucggcuguacuucgucauggaauaugucaacgguggggaccucauguaccacauucagcaaguaggaaaauuuaaggaaccacaagcaguauucuaugcggcagagauuuccaucggauuguucuuucuucauaaaagaggaaucauuuauagggaucugaaguuagauaacgucauguuggauucagaaggacauaucaaaauugcugacuuugggaugugcaaggaacacaugauggauggagucacgaccaggaccuucugugggacuccagauuauaucgccccagagauaaucgcuuaucagccguauggaaaaucuguggacuggugggccuauggcguccuguuguaugaaaugcuugccgggcagccuccauuugauggugaagaugaagacgagcuauuucagucuaucauggagcacaacguuuccuauccaaaauccuuguccaaggaggcuguuucugucugcaaaggacugaugaccaaacacccagccaagcggcugggcugugggccugagggggagagggacgugagagagcaugccuucuuccggaggaucgacugggaaaaacuggagaacagggagauccagccaccauucaagcccaaaguguguggcaaaggagcagagaacuuugacaaguucuucacacgaggacagcccgucuuaacaccaccugaucagcugguuauugcuaacauagaccagucugauuuugaaggguucucguaugucaacccccaguuugugcaccccaucuuacagagugcaguauga

SEQ ID NO: 9279 - RNA, 2019 nt, Artificial Sequence
  derived and/or modified sequence opt1 from PRKCA__Homo_sapiens__CCDS11664.1
auggccgacguguuccccggcaacgacagcaccgccucccaggacgucgcgaaccgcuucgcccggaagggggcccugcgccagaagaacgugcacgaggugaaggaccacaaguucaucgcccgguucuucaagcagccgaccuucugcagccacugcaccgacuucaucuggggcuucgggaagcagggcuuccagugccaggucugcugcuucguggugcacaagcgcugccacgaguucgucaccuucuccugccccggggccgacaagggccccgacaccgacgacccccggagcaagcacaaguucaagauccacaccuacggcuccccgacguucugcgaccacugcgggagccuccuguacggccugauccaccaggggaugaagugcgacacgugcgacaugaacgugcacaagcagugcgugaucaacguccccucccucugcggcauggaccacaccgagaagcgcgggcggaucuaccugaaggcggagguggccgacgagaagcugcacgugaccguccgcgacgccaagaaccucauccccauggaccccaacggccugagcgacccguacgugaagcugaagcucauccccgaccccaagaacgaguccaagcagaagaccaagaccauccggagcacccugaacccccaguggaacgaguccuucaccuucaagcugaagccgagcgacaaggaccgccggcucuccguggagaucugggacugggaccgcacgacccggaacgacuucaugggcagccuguccuucggggucagcgagcugaugaagaugcccgccuccggcugguacaagcuccugaaccaggaggagggggaguacuacaacgugcccauccccgagggcgacgaggagggcaacauggagcugcgccagaaguucgagaaggcgaagcucgggccggccggcaacaaggugaucagccccuccgaggaccggaagcagcccagcaacaaccuggaccgcgucaagcugaccgacuucaacuuccucauggugcuggggaagggcagcuucgggaaggugaugcuggccgaccggaagggcaccgaggagcucuacgccaucaagauccugaagaaggacgucgugauccaggacgacgacguggagugcacgauggucgagaagcgcgugcuggcccuccuggacaagcccccguuccugacccagcuccacuccugcuuccagaccgucgaccggcuguacuucgugauggaguacgugaacggcggggaccugauguaccacauccagcaggucggcaaguucaaggagccccaggcgguguucuacgccgccgagaucagcaucggccucuucuuccugcacaagcgcgggaucaucuaccgggaccugaagcucgacaacgugaugcuggacuccgaggggcacaucaagaucgccgacuucggcaugugcaaggagcacaugauggacggcgucaccacgcgcaccuucugcgggacccccgacuacaucgcccccgagaucaucgcguaccagccguacggcaagagcguggacuggugggccuacggggugcugcucuacgagaugcuggccggccagccgcccuucgacggggaggacgaggacgagcuguuccaguccaucauggagcacaacgucagcuaccccaagucccucagcaaggaggccguguccgugugcaagggccugaugaccaagcaccccgccaagcgccugggcugcgggcccgagggcgagcgggacguccgcgagcacgcguucuuccggcgcaucgacugggagaagcucgagaaccgggagauccagcccccguucaagcccaaggugugcgggaagggcgccgagaacuucgacaaguucuucacgcgcggccagcccgugcugacgcccccggaccagcuggucaucgccaacaucgaccagagcgacuucgagggguucuccuacgugaacccccaguucgugcaccccauccuccagagcgccgucuga

SEQ ID NO: 9280 - RNA, 2019 nt, Artificial Sequence
  derived and/or modified sequence opt2 from PRKCA__Homo_sapiens__CCDS11664.1
auggccgacgucuuccccggcaacgacuccaccgccucccaggacgucgccaaccgcuucgcccgcaagggcgcccuccgccagaagaacguccacgaggucaaggaccacaaguucaucgcccgcuucuucaagcagcccaccuucugcucccacugcaccgacuucaucuggggcuucggcaagcagggcuuccagugccaggucugcugcuucgucguccacaagcgcugccacgaguucgucaccuucuccugccccggcgccgacaagggccccgacaccgacgacccccgcuccaagcacaaguucaagauccacaccuacggcucccccaccuucugcgaccacugcggcucccuccucuacggccucauccaccagggcaugaagugcgacaccugcgacaugaacguccacaagcagugcgucaucaacguccccucccucugcggcauggaccacaccgagaagcgcggccgcaucuaccucaaggccgaggucgccgacgagaagcuccacgucaccguccgcgacgccaagaaccucauccccauggaccccaacggccucuccgaccccuacgucaagcucaagcucauccccgaccccaagaacgaguccaagcagaagaccaagaccauccgcuccacccucaacccccaguggaacgaguccuucaccuucaagcucaagcccuccgacaaggaccgccgccucuccgucgagaucugggacugggaccgcaccacccgcaacgacuucaugggcucccucuccuucggcgucuccgagcucaugaagaugcccgccuccggcugguacaagcuccucaaccaggaggagggcgaguacuacaacguccccauccccgagggcgacgaggagggcaacauggagcuccgccagaaguucgagaaggccaagcucggccccgccggcaacaaggucaucucccccuccgaggaccgcaagcagcccuccaacaaccucgaccgcgucaagcucaccgacuucaacuuccucaugguccucggcaagggcuccuucggcaaggucaugcucgccgaccgcaagggcaccgaggagcucuacgccaucaagauccucaagaaggacgucgucauccaggacgacgacgucgagugcaccauggucgagaagcgcguccucgcccuccucgacaagccccccuuccucacccagcuccacuccugcuuccagaccgucgaccgccucuacuucgucauggaguacgucaacggcggcgaccucauguaccacauccagcaggucggcaaguucaaggagccccaggccgucuucuacgccgccgagaucuccaucggccucuucuuccuccacaagcgcggcaucaucuaccgcgaccucaagcucgacaacgucaugcucgacuccgagggccacaucaagaucgccgacuucggcaugugcaaggagcacaugauggacggcgucaccacccgcaccuucugcggcacccccgacuacaucgcccccgagaucaucgccuaccagcccuacggcaaguccgucgacuggugggccuacggcguccuccucuacgagaugcucgccggccagccccccuucgacggcgaggacgaggacgagcucuuccaguccaucauggagcacaacgucuccuaccccaagucccucuccaaggaggccgucuccgucugcaagggccucaugaccaagcaccccgccaagcgccucggcugcggccccgagggcgagcgcgacguccgcgagcacgccuucuuccgccgcaucgacugggagaagcucgagaaccgcgagauccagccccccuucaagcccaaggucugcggcaagggcgccgagaacuucgacaaguucuucacccgcggccagcccguccucaccccccccgaccagcucgucaucgccaacaucgaccaguccgacuucgagggcuucuccuacgucaacccccaguucguccaccccauccuccaguccgccgucuga

SEQ ID NO: 9281 - RNA, 2019 nt, Artificial Sequence
  derived and/or modified sequence opt3 from PRKCA__Homo_sapiens__CCDS11664.1
auggccgacguguuccccggcaacgauagcaccgcuucccaggacgucgcaaauagauuugccaggaagggggcgcugcggcaaaagaacguucacgaggugaaggaucauaaauucaucgcucgcuuuuucaagcagccuaccuuuugcucucacuguacugacuucauuuggggauuugguaaacagggcuuccagugccaaguauguugcuuugugguccauaagcgaugucacgaguucgugacguuuucaugcccaggggccgauaagggaccggacaccgaugacccccguaguaaacauaaguucaaaauacacacauacggcagcccuacuuuuugugaucacugcgguucccuccuuuaugggcugauccaucagggaaugaagugugauaccugcgacaugaauguucacaaacagugugugauuaacgucccaucuuugugcggcauggaccauacagaaaagagaggcaggaucuacuuaaaggcagaaguggccgaugagaaacugcacguaaccguucgggacgcuaagaaucuaauucccauggacccuaacgggcucucggauccauaugugaaacugaaacuuauccccgacccuaaaaaugaaucaaagcagaaaacuaagacaauacgcagcacccugaacccacaauggaaugagaguuucacguucaaguugaaaccguccgauaaggacagaaggcucucugucgagaucugggauugggaccggacuacccgcaacgauuuuaugggaagccuguccuucggugugucagaacugaugaaaaugcccgcaaguggcugguacaagcucuuaaaucaggaggaaggggaguauuacaacgugccuauuccagagggagacgaagagggcaauauggaacugcgacagaaauuugagaaggccaaacuuggucccgcugggaacaaggucaucagcccuucugaagauagaaagcagccauccaauaacuuggacaggguuaaacugacagauuucaacuuucuaauggugcucggaaagggcucauucggcaaaguaaugcuggccgaccggaaggggacugaggagcuuuaugcgauuaagauccugaaaaaggacguggucauacaagaugacgauguggaaugcaccaugguugagaaacguguguuggcacuccuggacaagcccccguuuuuaacacagcugcacagcuguuuccagaccgucgaucgccucuacuuugugauggaauacguaaauggaggugaccuuauguaucauauucaacagguuggcaaauucaaggagccucaggccguguuuuacgcugccgaaaucaguauugggcuguucuuuuugcacaagagaggaaucaucuauagggaucuaaaacuggacaacgucaugcucgauucugagggccauauuaagauagcagacuucgguaugugcaaagagcacaugauggauggggugacgacucggacauucuguggcacccccgacuacaucgcuccagaaauuaucgccuaucagccuuacggaaaguccgucgauuggugggcguauggcgugcugcuuuacgagaugcuggccgggcaacccccauuugacggagaagacgaggaugaauuguuccagagcauaauggagcauaauguuucguaccccaaaucucucuccaaggaggcagugucaguaugcaaaggucugaugacuaagcacccugcuaagcgauuaggcugugggccagaaggagagcgcgacgucagagaacacgccuuuuucaggcggauugauugggagaaacuggagaaccgcgaaauccagccgcccuuuaagccuaaagugugcggcaagggugcugagaauuucgacaaauuuuucacaagagggcagccaguucuaacacccccugaucaacucgugaucgccaacauugaccagagugauuuugaaggcuucagcuaugucaauccacaguuugugcaucccauccugcaguccgcaguauga

SEQ ID NO: 9282 - RNA, 2019 nt, Artificial Sequence
  derived and/or modified sequence opt4 from PRKCA__Homo_sapiens__CCDS11664.1
auggccgacguguuccccggcaacgacagcaccgccagccaggacguggccaacagauucgccagaaagggcgcccugagacagaagaacgugcacgaggugaaggaccacaaguucaucgccagauucuucaagcagcccaccuucugcagccacugcaccgacuucaucuggggcuucggcaagcagggcuuccagugccaggugugcugcuucguggugcacaagagaugccacgaguucgugaccuucagcugccccggcgccgacaagggccccgacaccgacgaccccagaagcaagcacaaguucaagauccacaccuacggcagccccaccuucugcgaccacugcggcagccugcuguacggccugauccaccagggcaugaagugcgacaccugcgacaugaacgugcacaagcagugcgugaucaacgugcccagccugugcggcauggaccacaccgagaagagaggcagaaucuaccugaaggccgagguggccgacgagaagcugcacgugaccgugagagacgccaagaaccugauccccauggaccccaacggccugagcgaccccuacgugaagcugaagcugauccccgaccccaagaacgagagcaagcagaagaccaagaccaucagaagcacccugaacccccaguggaacgagagcuucaccuucaagcugaagcccagcgacaaggacagaagacugagcguggagaucugggacugggacagaaccaccagaaacgacuucaugggcagccugagcuucggcgugagcgagcugaugaagaugcccgccagcggcugguacaagcugcugaaccaggaggagggcgaguacuacaacgugcccauccccgagggcgacgaggagggcaacauggagcugagacagaaguucgagaaggccaagcugggccccgccggcaacaaggugaucagccccagcgaggacagaaagcagcccagcaacaaccuggacagagugaagcugaccgacuucaacuuccugauggugcugggcaagggcagcuucggcaaggugaugcuggccgacagaaagggcaccgaggagcuguacgccaucaagauccugaagaaggacguggugauccaggacgacgacguggagugcaccaugguggagaagagagugcuggcccugcuggacaagccccccuuccugacccagcugcacagcugcuuccagaccguggacagacuguacuucgugauggaguacgugaacggcggcgaccugauguaccacauccagcaggugggcaaguucaaggagccccaggccguguucuacgccgccgagaucagcaucggccuguucuuccugcacaagagaggcaucaucuacagagaccugaagcuggacaacgugaugcuggacagcgagggccacaucaagaucgccgacuucggcaugugcaaggagcacaugauggacggcgugaccaccagaaccuucugcggcacccccgacuacaucgcccccgagaucaucgccuaccagcccuacggcaagagcguggacuggugggccuacggcgugcugcuguacgagaugcuggccggccagccccccuucgacggcgaggacgaggacgagcuguuccagagcaucauggagcacaacgugagcuaccccaagagccugagcaaggaggccgugagcgugugcaagggccugaugaccaagcaccccgccaagagacugggcugcggccccgagggcgagagagacgugagagagcacgccuucuucagaagaaucgacugggagaagcuggagaacagagagauccagccccccuucaagcccaaggugugcggcaagggcgccgagaacuucgacaaguucuucaccagaggccagcccgugcugaccccccccgaccagcuggugaucgccaacaucgaccagagcgacuucgagggcuucagcuacgugaacccccaguucgugcaccccauccugcagagcgccguguga

SEQ ID NO: 9283 - RNA, 2019 nt, Artificial Sequence
  derived and/or modified sequence opt5 from PRKCA__Homo_sapiens__CCDS11664.1
auggccgacguguuccccggcaacgauagcaccgcuucccaggacgucgccaauagauuugcgcggaagggggcucugcgccagaaaaacguucacgaggugaaggaucauaaauucaucgccagauuuuucaagcaaccuacauuuugcucucacuguacggacuucauuuggggauuuggcaaacagggguuccagugccaaguguguugcuuugucgugcauaagcggugucacgaguucguuaccuuuagcugcccgggagccgauaagggccccgacacagaugacccucgcuccaaacauaaguucaaaauccacaccuacgggucucccacauuuugugaucacugcggaagccuccuguauggccuuauucaucagggcaugaagugugauaccugcgacaugaaugugcacaaacagugugucaucaacgugccuucccugugcgggauggaccauacagaaaagagaggacggauuuaccucaaggcugaaguugccgaugagaaacugcacgugaccguccgcgacgcuaagaaucuuauccccauggacccuaacggccugucugauccguaugugaaacucaagcugauccccgacccuaaaaaugaaagcaagcagaaaacgaagaccauuagauccacacugaacccccaauggaaugagagcuucaccuucaagcucaaaccuucugauaaggaccggcgccuguccguggagaucugggauugggacagaacaacccggaacgauuuuauggggagccuuucuuucggagucuccgaacugaugaaaaugcccgccagcggcugguacaagcuccugaaucaggaggaaggggaguauuacaacguuccgauuccugagggagacgaagagggcaauauggaacuucgccagaaauuugagaaggcgaagcugggccccgccgggaacaaagugaucucuccuuccgaagauagaaagcagcccagcaauaaccucgaccgggugaaacugacggauuucaacuuucugaugguccucggaaagggcuccuucgggaaagugaugcuggcugaccgcaagggaacagaggagcuuuaugccauuaagauccugaaaaaggacguugugauucaagaugacgaugucgaaugcaccaugguggagaaaagaguucucgcucugcuugacaagcccccuuuucugacacagcuccacucuuguuuccagaccguggaucggcuguacuuugucauggaauacgugaauggcggggaccugauguaucauauccaacaggucggaaaauucaaggagccgcaggccguguuuuacgcggccgaaaucagcauuggccucuucuuucugcacaagagaggcaucauuuaucgcgaucuuaaacuggacaacguuaugcucgauuccgaggggcauaucaagauugcugacuucggaaugugcaaagagcacaugauggauggcgugaccacacggacguucugugggacccccgacuacaucgccccugaaaucauugcuuaucagcccuacggaaagagcgucgauuggugggccuauggcgugcugcuuuacgagaugcuggccgggcaaccucccuuugacggcgaagacgaggaugaacucuuccagucuaucauggagcauaauguuuccuacccgaaaagccugucuaaggaggcugugagcgucugcaaaggacugaugacaaagcacccugcgaagagacucggcugugggcccgaaggagagcgcgacgugcgggaacacgccuuuuucagacgcauugauugggagaaacuggagaaccgggaaauccagccucccuuuaagccuaaagugugcggcaagggggcugagaauuucgacaaauuuuucaccagaggacagcccguucuuacaccgccugaucaacuggucauugccaacaucgaccaguccgauuuugaaggcuucucuuaugugaauccccaguuugugcaucccauccuccagagcgccgucuga

SEQ ID NO: 9284 - protein, 878 aa, Artificial Sequence
  PRKD2__Homo_sapiens__NP_001073349.1
MATAPSYPAGLPGSPGPGSPPPPGGLELQSPPPLLPQIPAPGSGVSFHIQIGLTREFVLLPAASELAHVKQLACSIVDQKFPECGFYGLYDKILLFKHDPTSANLLQLVRSSGDIQEGDLVEVVLSASATFEDFQIRPHALTVHSYRAPAFCDHCGEMLFGLVRQGLKCDGCGLNYHKRCAFSIPNNCSGARKRRLSSTSLASGHSVRLGTSESLPCTAEELSRSTTELLPRRPPSSSSSSSASSYTGRPIELDKMLLSKVKVPHTFLIHSYTRPTVCQACKKLLKGLFRQGLQCKDCKFNCHKRCATRVPNDCLGEALINGDVPMEEATDFSEADKSALMDESEDSGVIPGSHSENALHASEEEEGEGGKAQSSLGYIPLMRVVQSVRHTTRKSSTTLREGWVVHYSNKDTLRKRHYWRLDCKCITLFQNNTTNRYYKEIPLSEILTVESAQNFSLVPPGTNPHCFEIVTANATYFVGEMPGGTPGGPSGQGAEAARGWETAIRQALMPVILQDAPSAPGHAPHRQASLSISVSNSQIQENVDIATVYQIFPDEVLGSGQFGVVYGGKHRKTGRDVAVKVIDKLRFPTKQESQLRNEVAILQSLRHPGIVNLECMFETPEKVFVVMEKLHGDMLEMILSSEKGRLPERLTKFLITQILVALRHLHFKNIVHCDLKPENVLLASADPFPQVKLCDFGFARIIGEKSFRRSVVGTPAYLAPEVLLNQGYNRSLDMWSVGVIMYVSLSGTFPFNEDEDINDQIQNAAFMYPASPWSHISAGAIDLINNLLQVKMRKRYSVDKSLSHPWLQEYQTWLDLRELEGKMGERYITHESDDARWEQFAAEHPLPGSGLPTDRDLGGACPPQDHDMQGLAERISVL

SEQ ID NO: 9285 - RNA, 2637 nt, Artificial Sequence
  PRKD2__Homo_sapiens__CCDS12689.1
auggccaccgcccccucuuaucccgccgggcucccuggcucucccgggccggggucuccuccgccccccggcggccuagagcugcagucgccgccaccgcuacugccccagaucccggccccggguuccggggucuccuuucacauccagaucgggcugacccgcgaguucgugcuguugcccgccgccuccgagcuggcucaugugaagcagcuggccuguuccaucguggaccagaaguucccugaguguggcuucuacggccuuuacgacaagauccugcuuuucaaacaugaccccacgucggccaaccuccugcagcuggugcgcucguccggagacauccaggagggcgaccugguggagguggugcugucggccucggccaccuucgaggacuuccagauccgcccgcacgcccucacggugcacuccuaucgggcgccugccuucugugaucacugcggggagaugcucuucggccuagugcgccagggccucaagugcgauggcugcgggcugaacuaccacaagcgcugugccuucagcauccccaacaacuguaguggggcccgcaaacggcgccugucauccacgucucuggccaguggccacucggugcgccucggcaccuccgagucccugcccugcacggcugaagagcugagccguagcaccaccgaacuccugccucgccgucccccgucauccucuuccuccucuucugccucaucguauacgggccgccccauugagcuggacaagaugcugcucuccaaggucaaggugccgcacaccuuccucauccacagcuauacacggcccaccguuugccaggcuugcaagaaacuccucaagggccucuuccggcagggccugcaaugcaaagacugcaaguuuaacugucacaaacgcugcgccacccgcgucccuaaugacugccugggggaggcccuuaucaauggagaugugccgauggaggaggccaccgauuucagcgaggcugacaagagcgcccucauggaugagucagaggacuccggugucaucccuggcucccacucagagaaugcgcuccacgccagugaggaggaggaaggcgagggaggcaaggcccagagcucccugggguacaucccccuaaugaggguggugcaaucggugcgacacacgacgcggaaauccagcaccacgcugcgggaggguugggugguucauuacagcaacaaggacacgcugagaaagcggcacuauuggcgccuggacugcaaguguaucacgcucuuccagaacaacacgaccaacagauacuauaaggaaauuccgcugucagaaauccucacgguggaguccgcccagaacuucagccuugugccgccgggcaccaacccacacugcuuugagaucgucacugccaaugccaccuacuucgugggcgagaugccuggcgggacuccgggugggccaagugggcagggggcugaggccgcccggggcugggagacagccauccgccaggcccugaugcccgucauccuucaggacgcacccagcgccccaggccacgcgccccacagacaagcuucucugagcaucucuguguccaacagucagauccaagagaauguggacauugccacugucuaccagaucuucccugacgaagugcugggcucagggcaguuuggaguggucuauggaggaaaacaccggaagacaggccgggacguggcaguuaaggucauugacaaacugcgcuucccuaccaagcaggagagccagcuccggaaugaaguggccauucugcagagccugcggcaucccgggaucgugaaccuggagugcauguucgagacgccugagaaaguguuuguggugauggagaagcugcauggggacauguuggagaugauccuguccagugagaagggccggcugccugagcgccucaccaaguuccucaucacccagauccugguggcuuugagacaccuucacuucaagaacauuguccacugugacuugaaaccagaaaacguguugcuggcaucagcagacccauuuccucaggugaagcugugugacuuuggcuuugcucgcaucaucggcgagaagucguuccgccgcucaguggugggcacgccggccuaccuggcacccgaggugcugcucaaccagggcuacaaccgcucgcuggacauguggucagugggcgugaucauguacgucagccucagcggcaccuucccuuucaacgaggaugaggacaucaaugaccagauccagaacgccgccuucauguacccggccagccccuggagccacaucucagcuggagccauugaccucaucaacaaccugcugcaggugaagaugcgcaaacgcuacagcguggacaaaucucucagccaccccugguuacaggaguaccagacguggcuggaccuccgagagcuggaggggaagaugggagagcgauacaucacgcaugagagugacgacgcgcgcugggagcaguuugcagcagagcauccgcugccugggucugggcugcccacggacagggaucucgguggggccuguccaccacaggaccacgacaugcaggggcuggcggagcgcaucaguguucucuga

SEQ ID NO: 9286 - RNA, 2637 nt, Artificial Sequence
  derived and/or modified sequence opt1 from PRKD2__Homo_sapiens__CCDS12689.1
auggccaccgcccccagcuacccggcgggccugcccgggucccccggccccgggagcccgcccccccccggcgggcucgagcugcaguccccgcccccccugcucccccagaucccggcccccggcagcggcguguccuuccacauccagaucgggcugacccgcgaguucguccugcuccccgccgccagcgagcuggcccacgugaagcagcuggcgugcuccaucguggaccagaaguuccccgagugcggcuucuacgggcucuacgacaagauccugcuguucaagcacgacccgacgagcgccaaccuccugcagcugguccgguccagcggcgacauccaggagggggaccucguggaggugguccuguccgccagcgccaccuucgaggacuuccagauccgcccccacgcgcugaccgugcacuccuaccgggcccccgccuucugcgaccacugcggcgagaugcucuucggccuggugcgccaggggcugaagugcgacggcugcgggcucaacuaccacaagcggugcgccuucagcauccccaacaacugcuccggcgcccgcaagcggcgccugagcuccaccagccuggcguccggccacagcguccggcucgggacgagcgagucccugccgugcaccgccgaggagcugagccgcuccaccaccgagcuccugccccggcgcccccccagcuccagcuccagcuccagcgccuccagcuacacgggccggccgaucgagcuggacaagaugcuccuguccaaggugaaggugccccacaccuuccugauccacagcuacacccgccccaccgucugccaggccugcaagaagcuccugaaggggcuguuccggcagggccuccagugcaaggacugcaaguucaacugccacaagcgcugcgccacgcgggugcccaacgacugccugggggaggcgcugaucaacggcgacgugccgauggaggaggccaccgacuucuccgaggccgacaagagcgcccucauggacgaguccgaggacagcggcgucauccccgggucccacagcgagaacgcccugcacgcgagcgaggaggaggagggcgaggggggcaaggcccaguccagccugggguacaucccccucaugcgcguggugcaguccguccggcacaccacccgcaagagcuccacgacccugcgggagggcuggguggugcacuacagcaacaaggacacccugcgcaagcgccacuacuggcggcucgacugcaagugcaucacccuguuccagaacaacacgaccaaccgcuacuacaaggagaucccgcuguccgagauccucaccgucgagagcgcccagaacuucucccuggugccccccggcaccaacccccacugcuucgagaucgugacggccaacgccaccuacuucgucggggagaugccgggcgggacccccggcgggcccagcggccagggcgcggaggccgcccgggggugggagaccgccauccgccaggcgcugaugcccgugauccugcaggacgccccguccgcccccggccacgccccccaccggcaggccagccucuccaucagcgucuccaacagccagauccaggagaacguggacaucgcgacgguguaccagaucuuccccgacgagguccugggguccggccaguucggcgugguguacgggggcaagcaccgcaagaccgggcgggacgucgccgugaaggugaucgacaagcugcgcuucccgaccaagcaggagagccagcuccggaacgaggucgccauccugcagagccugcgccaccccggcaucgugaaccucgagugcauguucgagacccccgagaagguguucgucgugauggagaagcugcacggggacaugcuggagaugauccucuccagcgagaagggccggcugcccgagcgccugacgaaguuccucaucacccagauccugguggcccugcggcaccuccacuucaagaacaucguccacugcgaccugaagccggagaacgugcugcucgccuccgcggaccccuucccccaggugaagcugugcgacuucggcuucgcccgcaucaucggggagaagagcuuccggcgcuccgucgugggcacccccgccuaccuggccccggaggugcuccugaaccagggguacaaccggagccuggacaugugguccgucggcgugaucauguacgugagccucuccgggaccuuccccuucaacgaggacgaggacaucaacgaccagauccagaacgccgcguucauguaccccgccagccccuggucccacaucagcgccggcgccaucgaccugaucaacaaccugcuccaggucaagaugcgcaagcgguacuccguggacaagagccugucccacccguggcugcaggaguaccagacguggcucgaccugcgcgagcuggagggcaagaugggggagcgcuacaucacccacgagagcgacgacgcgcggugggagcaguucgccgccgagcacccccuccccggcuccgggcugccgaccgaccgcgaccugggcggggccugccccccccaggaccacgacaugcagggccucgccgagcggaucagcgugcuguga

SEQ ID NO: 9287 - RNA, 2637 nt, Artificial Sequence
  derived and/or modified sequence opt2 from PRKD2__Homo_sapiens__CCDS12689.1
auggccaccgcccccuccuaccccgccggccuccccggcucccccggccccggcuccccccccccccccggcggccucgagcuccaguccccccccccccuccucccccagauccccgcccccggcuccggcgucuccuuccacauccagaucggccucacccgcgaguucguccuccuccccgccgccuccgagcucgcccacgucaagcagcucgccugcuccaucgucgaccagaaguuccccgagugcggcuucuacggccucuacgacaagauccuccucuucaagcacgaccccaccuccgccaaccuccuccagcucguccgcuccuccggcgacauccaggagggcgaccucgucgaggucguccucuccgccuccgccaccuucgaggacuuccagauccgcccccacgcccucaccguccacuccuaccgcgcccccgccuucugcgaccacugcggcgagaugcucuucggccucguccgccagggccucaagugcgacggcugcggccucaacuaccacaagcgcugcgccuucuccauccccaacaacugcuccggcgcccgcaagcgccgccucuccuccaccucccucgccuccggccacuccguccgccucggcaccuccgagucccuccccugcaccgccgaggagcucucccgcuccaccaccgagcuccucccccgccgcccccccuccuccuccuccuccuccuccgccuccuccuacaccggccgccccaucgagcucgacaagaugcuccucuccaaggucaaggucccccacaccuuccucauccacuccuacacccgccccaccgucugccaggccugcaagaagcuccucaagggccucuuccgccagggccuccagugcaaggacugcaaguucaacugccacaagcgcugcgccacccgcguccccaacgacugccucggcgaggcccucaucaacggcgacguccccauggaggaggccaccgacuucuccgaggccgacaaguccgcccucauggacgaguccgaggacuccggcgucauccccggcucccacuccgagaacgcccuccacgccuccgaggaggaggagggcgagggcggcaaggcccaguccucccucggcuacaucccccucaugcgcgucguccaguccguccgccacaccacccgcaaguccuccaccacccuccgcgagggcugggucguccacuacuccaacaaggacacccuccgcaagcgccacuacuggcgccucgacugcaagugcaucacccucuuccagaacaacaccaccaaccgcuacuacaaggagaucccccucuccgagauccucaccgucgaguccgcccagaacuucucccucgucccccccggcaccaacccccacugcuucgagaucgucaccgccaacgccaccuacuucgucggcgagaugcccggcggcacccccggcggccccuccggccagggcgccgaggccgcccgcggcugggagaccgccauccgccaggcccucaugcccgucauccuccaggacgcccccuccgcccccggccacgccccccaccgccaggccucccucuccaucuccgucuccaacucccagauccaggagaacgucgacaucgccaccgucuaccagaucuuccccgacgagguccucggcuccggccaguucggcgucgucuacggcggcaagcaccgcaagaccggccgcgacgucgccgucaaggucaucgacaagcuccgcuuccccaccaagcaggagucccagcuccgcaacgaggucgccauccuccagucccuccgccaccccggcaucgucaaccucgagugcauguucgagacccccgagaaggucuucgucgucauggagaagcuccacggcgacaugcucgagaugauccucuccuccgagaagggccgccuccccgagcgccucaccaaguuccucaucacccagauccucgucgcccuccgccaccuccacuucaagaacaucguccacugcgaccucaagcccgagaacguccuccucgccuccgccgaccccuucccccaggucaagcucugcgacuucggcuucgcccgcaucaucggcgagaaguccuuccgccgcuccgucgucggcacccccgccuaccucgcccccgagguccuccucaaccagggcuacaaccgcucccucgacaugugguccgucggcgucaucauguacgucucccucuccggcaccuuccccuucaacgaggacgaggacaucaacgaccagauccagaacgccgccuucauguaccccgccucccccuggucccacaucuccgccggcgccaucgaccucaucaacaaccuccuccaggucaagaugcgcaagcgcuacuccgucgacaagucccucucccaccccuggcuccaggaguaccagaccuggcucgaccuccgcgagcucgagggcaagaugggcgagcgcuacaucacccacgaguccgacgacgcccgcugggagcaguucgccgccgagcacccccuccccggcuccggccuccccaccgaccgcgaccucggcggcgccugccccccccaggaccacgacaugcagggccucgccgagcgcaucuccguccucuga

SEQ ID NO: 9288 - RNA, 2637 nt, Artificial Sequence
  derived and/or modified sequence opt3 from PRKD2__Homo_sapiens__CCDS12689.1
auggccaccgcucccagcuacccugcaggccugccaggguccccgggacccgguucuccuccacccccuggcgggcucgagcuucagucaccacccccucuguugccacaaaucccggcccccggaaguggcgugagcuuccacauucagauagguuuaacaagagaauuuguccugcuaccugcggcuuccgagcucgcccauguuaagcagcuggcaugcucuaucguggaccagaaauucccagaauguggguuuuauggacuuuacgauaagauucuguuguucaaacacgaccccacuucggccaaccuccugcaacugguaaggucaagcggcgauauccaggagggcgaccucguggaagucguguuaagugcuuccgcaacguuugaggauuuccagauucggccucaugcccugaccguucacucuuaucgcgcuccagccuuuugcgaccauuguggggagaugcuuuucggauuggugcgacagggucugaagugcgauggcugugggcuaaauuaccacaaacguugcgcguuuagcauccccaacaauuguuccggagcaagaaagaggcggcucucaaguacaagccuggccucuggccacuccguccgccuugguacuucagaaagccugccgugcaccgcugaggaauugaguagaucuacaaccgagcuccugccuaggcggcccccauccagcucgucuuccucaagugccagcuccuauacugggcgcccuauagaguuagacaagaugcugcucucuaaagugaagguaccccauacauuccuuauccacagcuacacccgaccaacgguuugucaagcaugcaaaaagcuguugaaaggacuauuuagacagggccugcaguguaaggauugcaaguucaacugccauaaaaggugugcuacucgggugcccaaugacugccucggcgaagcccugauuaacggggaugucccuauggaggaagcgaccgacuuuucagaggccgauaagagugcacuuauggacgaauccgaggacagcggagugaucccagguucucacucagagaaugcucugcacgccagugaagaggaagagggcgaagggggaaaagcucagagcuccuugggcuauauuccgcucaugcgugugguccaaucuguucgccauacaacuagaaagucgagcaccacacugagggaggguugggugguacacuacuccaacaaagauaccuuacggaagcgacauuacuggcgccuggacuguaaaugcaucacgcuauuccagaauaacacuacaaauagauauuacaaggagauaccccucucagaaauucugaccguggagagugcccagaacuucucucuugucccuccagggacuaauccccacuguuuugaaaucgugacagcaaacgccaccuauuucguuggcgagaugccuggaggcacgccagggggacccagcggucaaggcgcugaagcggcaagggggugggagaccgccauucggcaggcuuugaugccggugauccugcaggaugccccuuccgcaccaggacaugcuccccaccgccaggccucacucagcaucucugucuccaauagucaaauucaggagaacguggacauagccacaguauaccagaucuuuccugaugaaguucugggcagcggucaguucgggguggucuauggcggaaagcacagaaaaacuggcagggacguggcagucaaggugauugauaaacuucguuuucccaccaagcaagagucucagcugcggaacgaaguugcgaucuugcagucccuccgacauccagggauagugaaucuggagugcauguucgagacaccugaaaaaguauuugucgugauggagaaguuacacggagacaugcuggaaaugauucuaucaagugagaaggguagacuccccgaaaggcugacuaaauuccuuaucacccagaucuugguugcucugcgccaucuccacuuuaagaacauugugcacugugaucugaaaccagagaaugucuuacuggccagcgcagacccguucccucaagugaaacuuugcgauuuuggcuucgcccggaucauuggggagaagucguuuagaagguccguagugggaacacccgcuuacuuggccccagaaguucuccugaaccagggcuauaaucgcucucuagacauguggagcgucggugugauaauguacgugucacugagugggaccuuccccuucaacgaggacgaagauaucaaugaccagauucagaacgcagcuuuuauguacccugccuccccauggucucauaucagcgcgggcgccaucgaucucauuaauaaccugcuucaagucaagaugcgaaagcgguauuccguugacaaaucauugagccaccccuggcugcaggaguaccagacuugguuagaucuccgugaacuggagggaaagaugggcgagagauauauaacgcaugaaagugacgaugcuaggugggagcaauucgcagccgaacacccucuuccggggucuggacugccaacagaccgcgauuugggcggugcuugucccccucaggaccaugauaugcaggggcucgccgagcggaucuccgugcuguga

SEQ ID NO: 9289 - RNA, 2637 nt, Artificial Sequence
  derived and/or modified sequence opt4 from PRKD2__Homo_sapiens__CCDS12689.1
auggccaccgcccccagcuaccccgccggccugcccggcagccccggccccggcagcccccccccccccggcggccuggagcugcagagcccccccccccugcugccccagauccccgcccccggcagcggcgugagcuuccacauccagaucggccugaccagagaguucgugcugcugcccgccgccagcgagcuggcccacgugaagcagcuggccugcagcaucguggaccagaaguuccccgagugcggcuucuacggccuguacgacaagauccugcuguucaagcacgaccccaccagcgccaaccugcugcagcuggugagaagcagcggcgacauccaggagggcgaccugguggagguggugcugagcgccagcgccaccuucgaggacuuccagaucagaccccacgcccugaccgugcacagcuacagagcccccgccuucugcgaccacugcggcgagaugcuguucggccuggugagacagggccugaagugcgacggcugcggccugaacuaccacaagagaugcgccuucagcauccccaacaacugcagcggcgccagaaagagaagacugagcagcaccagccuggccagcggccacagcgugagacugggcaccagcgagagccugcccugcaccgccgaggagcugagcagaagcaccaccgagcugcugcccagaagaccccccagcagcagcagcagcagcagcgccagcagcuacaccggcagacccaucgagcuggacaagaugcugcugagcaaggugaaggugccccacaccuuccugauccacagcuacaccagacccaccgugugccaggccugcaagaagcugcugaagggccuguucagacagggccugcagugcaaggacugcaaguucaacugccacaagagaugcgccaccagagugcccaacgacugccugggcgaggcccugaucaacggcgacgugcccauggaggaggccaccgacuucagcgaggccgacaagagcgcccugauggacgagagcgaggacagcggcgugauccccggcagccacagcgagaacgcccugcacgccagcgaggaggaggagggcgagggcggcaaggcccagagcagccugggcuacaucccccugaugagaguggugcagagcgugagacacaccaccagaaagagcagcaccacccugagagagggcuggguggugcacuacagcaacaaggacacccugagaaagagacacuacuggagacuggacugcaagugcaucacccuguuccagaacaacaccaccaacagauacuacaaggagaucccccugagcgagauccugaccguggagagcgcccagaacuucagccuggugccccccggcaccaacccccacugcuucgagaucgugaccgccaacgccaccuacuucgugggcgagaugcccggcggcacccccggcggccccagcggccagggcgccgaggccgccagaggcugggagaccgccaucagacaggcccugaugcccgugauccugcaggacgcccccagcgcccccggccacgccccccacagacaggccagccugagcaucagcgugagcaacagccagauccaggagaacguggacaucgccaccguguaccagaucuuccccgacgaggugcugggcagcggccaguucggcgugguguacggcggcaagcacagaaagaccggcagagacguggccgugaaggugaucgacaagcugagauuccccaccaagcaggagagccagcugagaaacgagguggccauccugcagagccugagacaccccggcaucgugaaccuggagugcauguucgagacccccgagaagguguucguggugauggagaagcugcacggcgacaugcuggagaugauccugagcagcgagaagggcagacugcccgagagacugaccaaguuccugaucacccagauccugguggcccugagacaccugcacuucaagaacaucgugcacugcgaccugaagcccgagaacgugcugcuggccagcgccgaccccuucccccaggugaagcugugcgacuucggcuucgccagaaucaucggcgagaagagcuucagaagaagcguggugggcacccccgccuaccuggcccccgaggugcugcugaaccagggcuacaacagaagccuggacauguggagcgugggcgugaucauguacgugagccugagcggcaccuuccccuucaacgaggacgaggacaucaacgaccagauccagaacgccgccuucauguaccccgccagccccuggagccacaucagcgccggcgccaucgaccugaucaacaaccugcugcaggugaagaugagaaagagauacagcguggacaagagccugagccaccccuggcugcaggaguaccagaccuggcuggaccugagagagcuggagggcaagaugggcgagagauacaucacccacgagagcgacgacgccagaugggagcaguucgccgccgagcacccccugcccggcagcggccugcccaccgacagagaccugggcggcgccugccccccccaggaccacgacaugcagggccuggccgagagaaucagcgugcuguga

SEQ ID NO: 9290 - RNA, 2637 nt, Artificial Sequence
  derived and/or modified sequence opt5 from PRKD2__Homo_sapiens__CCDS12689.1
auggccaccgcucccagcuacccugccggccugccggggucccccggaccuggcucucccccucccccugggggacucgagcugcagagcccgcccccucuucugccccaaaucccugcgcccggcuccggggugucuuuccacauucagaucggacucacaagagaauuuguccugcuuccggcugccagcgagcuggcccauguuaagcagcucgcuugcuccauuguggaccagaaauucccugaauguggcuuuuauggccuguacgauaagauccuccuguucaaacacgaccccacgucugccaaccugcuucaacuggugcggagcuccggggauauucaggagggagaccucgucgaagugguucugagcgcuucugccaccuuugaggauuuccagauccgcccucaugcgcuuacagugcacuccuauagagcccccgcuuuuugcgaccauuguggcgagaugcuguucgggcucguccggcagggacugaagugcgauggcugugggcugaauuaccacaaacgcugcgccuuuagcauccccaacaauuguucuggagcuagaaagcggcgccucuccagcaccucucuggccuccggccacagcgugagacuuggcacauccgaaucucugccuugcaccgcggaggaacucagccgguccacaaccgagcugcuuccgcgcagacccccuagcagcuccagcucuagcuccgccucuagcuauacggggcggcccauugagcuggacaagaugcuccuguccaaaguuaaggugccucauaccuuccugauccacagcuacacacgccccaccgucugucaggcuugcaaaaagcuccugaaaggacuuuuuagacaaggccugcaguguaaggauugcaaguucaacugccauaaacggugugccacacgcgugccgaaugacugccucggggaagcucugauuaacggagaugugccuauggaggaagccaccgacuuuucugaggccgauaaguccgcucuuauggacgaaagcgaggacucuggcgucauccccgggucccacagcgagaaugcgcugcacgccuccgaagaggaagagggagaaggcggcaaagcucagucuagccucggguauauuccucugaugagaguugugcaauccgugcggcauacgacaagaaagucuagcaccacacugcgcgagggaugggucgugcacuacuccaacaaagauacccuccggaagagacauuacuggcgccuggacuguaaaugcaucacccuuuuccagaauaacacaacgaaucgguauuacaaggagauuccccugagcgaaauccucaccguugagucugcccagaacuucucccuggugccucccggcacaaauccgcacuguuuugaaaucgucaccgccaacgcuacauauuucgugggggagaugccuggaggcacccccgggggccccagcggacaaggcgccgaagcggcuagagggugggagacggccauucgccaggcccugaugccuguuauccuucaggaugcuccgucugcccccggacaugcuccucaccggcaggccucccucagcauuucugugagcaauucccaaauccaggagaacgucgacauugcgacaguguaccagaucuuucccgaugaaguccugggcagcgggcaguucggagugguuuauggcgggaagcacagaaaaaccggccgcgacguggccgucaaggugaucgauaaacugcgguuuccuaccaagcaagagucucagcucagaaacgaaguugcuauucugcagucccuucgccaucccggaaucgugaaucuggagugcauguucgagacaccugaaaaagucuuuguggugauggagaagcuccacggcgacaugcuggaaaugauucugagcuccgagaaggggcggcuucccgaaagacucaccaaauuccugaucacacagauucugguugcccuccggcaucugcacuuuaagaacaucguccacugugaucuuaaaccggagaaugugcugcucgcuucugccgacccuuucccccaagugaagcugugcgauuuuggauucgcgcgcaucauuggcgagaaaucuuuuagacgguccgucguggggacgccugccuaccuggcucccgaaguucuucucaaccagggauauaauagaucucuggacauguggagcgugggcgucaucauguacgugucccugucugggaccuucccguucaacgaggacgaagauauuaaugaccagauccagaacgccgcuuuuauguacccugccagccccuggucccauauuagcgccggcgcuaucgaucucauuaauaaccugcuucaaguuaagaugcgcaagcgguauucuguggacaaaucccugagccacccuuggcuccaggaguaccagacauggcuggaucugagagaacuugagggaaagaugggcgagcgcuauaucacccaugaaucugacgaugcgagaugggagcaauucgccgcugaacacccccuccccggguccggacugccuacagaccgggaucugggcggggccuguccgccccaggaccaugauaugcagggacucgccgagcgcaucagcguccuguga

SEQ ID NO: 9291 - protein, 562 aa, Artificial Sequence
  Rab__Homo_sapiens__P52594
MAASAKRKQEEKHLKMLRDMTGLPHNRKCFDCDQRGPTYVNMTVGSFVCTSCSGSLRGLNPPHRVKSISMTTFTQQEIEFLQKHGNEVCKQIWLGLFDDRSSAIPDFRDPQKVKEFLQEKYEKKRWYVPPEQAKVVASVHASISGSSASSTSSTPEVKPLKSLLGDSAPTLHLNKGTPSQSPVVGRSQGQQQEKKQFDLLSDLGSDIFAAPAPQSTATANFANFAHFNSHAAQNSANADFANFDAFGQSSGSSNFGGFPTASHSPFQPQTTGGSAASVNANFAHFDNFPKSSSADFGTFNTSQSHQTASAVSKVSTNKAGLQTADKYAALANLDNIFSAGQGGDQGSGFGTTGKAPVGSVVSVPSQSSASSDKYAALAELDSVFSSAATSSNAYTSTSNASSNVFGTVPVVASAQTQPASSSVPAPFGATPSTNPFVAAAGPSVASSTNPFQTNARGATAATFGTASMSMPTGFGTPAPYSLPTSFSGSFQQPAFPAQAAFPQQTAFSQQPNGAGFAAFGQTKPVVTPFGQVAAAGVSSNPFMTGAPTGQFPTGSSSTNPFL

SEQ ID NO: 9292 - RNA, 1689 nt, Artificial Sequence
  Rab__Homo_sapiens__AAC37580
auggcggccagcgcgaagcggaagcaggaggagaagcaccugaagaugcugcgggacaugaccggccucccgcacaaccgaaagugcuucgacugcgaccagcgcggccccaccuacguuaacaugacggucggcuccuucguguguaccuccugcuccggcagccugcgaggauuaaauccaccacacagggugaaaucuaucuccaugacaacauucacacaacaggaaauugaauucuuacaaaaacauggaaaugaagucuguaaacagauuuggcuaggauuauuugaugauagaucuucagcaauuccagacuucagggauccacaaaaagugaaagaguuucuacaagaaaaguaugaaaagaaaagaugguaugucccgccagaacaagccaaagucguggcaucaguucaugcaucuauuucaggguccucugccaguagcacaagcagcacaccugaggucaaaccacugaaaucucuuuuaggggauucugcaccaacacugcacuuaaauaagggcacaccuagucaguccccaguuguaggucguucucaagggcagcagcaggagaagaagcaauuugaccuuuuaagugaucucggcucagacaucuuugcugcuccagcuccucagucaacagcuacagccaauuuugcuaacuuugcacauuucaacagucaugcagcucagaauucugcaaaugcagauuuugcaaacuuugaugcauuuggacagucuagugguucgaguaauuuuggagguuuccccacagcaagucacucuccuuuucagccccaaacuacagguggaagugcugcaucaguaaaugcuaauuuugcucauuuugauaacuuccccaaauccuccagugcugauuuuggaaccuucaauacuucccagagucaucaaacagcaucagcuguuaguaaaguuucaacgaacaaagcugguuuacagacugcagacaaauaugcagcacuugcuaauuuagacaauaucuucagugccgggcaagguggugaucagggaaguggcuuugggaccacagguaaagcuccuguugguucugugguuucaguucccagucagucaagugcaucuucagacaaguaugcagcucuggcagaacuagacagcguuuucaguucugcagccaccuccaguaaugcguauacuuccacaaguaaugcuagcagcaauguuuuuggaacagugccagugguugcuucugcacagacacagccugcuucaucaagugugccugcuccauuuggagcuacgccuuccacaaauccauuuguugcugcugcugguccuucuguggcaucuucuacaaacccauuucagaccaaugccagaggagcaacagcggcaaccuuuggcacugcauccaugagcaugcccacgggauucggcacuccugcucccuacagucuucccaccagcuuuaguggcagcuuucagcagccugccuuuccagcccaagcagcuuucccucaacagacagcuuuuucucaacagcccaauggugcagguuuugcagcauuuggacaaacaaagccaguaguaaccccuuuuggucaaguugcagcugcuggaguaucuaguaauccuuuuaugacuggugcaccaacaggacaauuuccaacaggaagcucaucaaccaauccuuucuuauag

SEQ ID NO: 9293 - RNA, 1689 nt, Artificial Sequence
  derived and/or modified sequence opt1 from Rab__Homo_sapiens__AAC37580
auggccgccagcgcgaagcgcaagcaggaggagaagcaccugaagaugcuccgggacaugaccggccugccccacaaccgcaagugcuucgacugcgaccagcgggggccgaccuacgugaacaugacggucggcuccuucgugugcaccagcugcuccgggagccugcgcggccucaacccgccccaccgggugaaguccaucagcaugaccaccuucacgcagcaggagaucgaguuccugcagaagcacgggaacgaggucugcaagcagaucuggcugggccucuucgacgaccgcuccagcgccauccccgacuuccgggacccccagaaggugaaggaguuccugcaggagaaguacgagaagaagcgcugguacgugccgcccgagcaggccaaggucguggccuccgugcacgccagcaucuccggcagcuccgcgagcuccaccagcuccacccccgaggucaagccccucaagagccugcugggggacuccgcccccacccugcaccucaacaagggcacgcccagccagagccccgugguggggcggucccagggccagcagcaggagaagaagcaguucgaccugcugagcgaccucggguccgacaucuucgccgccccggcgccccagagcaccgccaccgccaacuucgccaacuucgcccacuucaacucccacgcggcccagaacagcgccaacgccgacuucgccaacuucgacgcguucggccaguccagcggcuccagcaacuucgggggcuuccccaccgccucccacagccccuuccagccgcagacgaccgggggcuccgccgccagcgucaacgccaacuucgcgcacuucgacaacuuccccaaguccagcuccgccgacuucggcaccuucaacaccagccagucccaccagacggccagcgccgugagcaagguguccaccaacaaggccgggcugcagaccgcggacaaguacgccgcccuggccaaccucgacaacaucuucagcgcgggccagggcggggaccagggguccggcuucggcaccacggggaaggcccccgucggcagcgugguguccguccccagccaguccagcgccuccagcgacaaguacgccgcccuggcggagcuggacuccguguucagcuccgccgccaccagcuccaacgccuacaccagcaccuccaacgccagcagcaacguguucgggacggucccggugguggcguccgcccagacccagcccgccagcuccagcguccccgcccccuucggcgccaccccguccaccaaccccuucguggcggccgccgggcccagcgucgccuccagcacgaaccccuuccagaccaacgcgcgcggcgccaccgccgccaccuucggcacggccuccaugagcaugccgaccggguucggcacccccgcgcccuacucccucccgaccagcuucuccgggagcuuccagcagcccgccuuccccgcccaggccgccuucccccagcagacggcguucucccagcagccgaacggcgccggguucgccgccuucggccagaccaagcccguggugacccccuucggccaggucgccgcggccggggugagcuccaaccccuucaugaccggcgccccgaccgggcaguuccccacgggcagcuccagcaccaaccccuuccuguga

SEQ ID NO: 9294 - RNA, 1689 nt, Artificial Sequence
  derived and/or modified sequence opt2 from Rab__Homo_sapiens__AAC37580
auggccgccuccgccaagcgcaagcaggaggagaagcaccucaagaugcuccgcgacaugaccggccucccccacaaccgcaagugcuucgacugcgaccagcgcggccccaccuacgucaacaugaccgucggcuccuucgucugcaccuccugcuccggcucccuccgcggccucaaccccccccaccgcgucaaguccaucuccaugaccaccuucacccagcaggagaucgaguuccuccagaagcacggcaacgaggucugcaagcagaucuggcucggccucuucgacgaccgcuccuccgccauccccgacuuccgcgacccccagaaggucaaggaguuccuccaggagaaguacgagaagaagcgcugguacgucccccccgagcaggccaaggucgucgccuccguccacgccuccaucuccggcuccuccgccuccuccaccuccuccacccccgaggucaagccccucaagucccuccucggcgacuccgcccccacccuccaccucaacaagggcacccccucccagucccccgucgucggccgcucccagggccagcagcaggagaagaagcaguucgaccuccucuccgaccucggcuccgacaucuucgccgcccccgccccccaguccaccgccaccgccaacuucgccaacuucgcccacuucaacucccacgccgcccagaacuccgccaacgccgacuucgccaacuucgacgccuucggccaguccuccggcuccuccaacuucggcggcuuccccaccgccucccacucccccuuccagccccagaccaccggcggcuccgccgccuccgucaacgccaacuucgcccacuucgacaacuuccccaaguccuccuccgccgacuucggcaccuucaacaccucccagucccaccagaccgccuccgccgucuccaaggucuccaccaacaaggccggccuccagaccgccgacaaguacgccgcccucgccaaccucgacaacaucuucuccgccggccagggcggcgaccagggcuccggcuucggcaccaccggcaaggcccccgucggcuccgucgucuccguccccucccaguccuccgccuccuccgacaaguacgccgcccucgccgagcucgacuccgucuucuccuccgccgccaccuccuccaacgccuacaccuccaccuccaacgccuccuccaacgucuucggcaccguccccgucgucgccuccgcccagacccagcccgccuccuccuccguccccgcccccuucggcgccacccccuccaccaaccccuucgucgccgccgccggccccuccgucgccuccuccaccaaccccuuccagaccaacgcccgcggcgccaccgccgccaccuucggcaccgccuccauguccaugcccaccggcuucggcacccccgcccccuacucccuccccaccuccuucuccggcuccuuccagcagcccgccuuccccgcccaggccgccuucccccagcagaccgccuucucccagcagcccaacggcgccggcuucgccgccuucggccagaccaagcccgucgucacccccuucggccaggucgccgccgccggcgucuccuccaaccccuucaugaccggcgcccccaccggccaguuccccaccggcuccuccuccaccaaccccuuccucuga

SEQ ID NO: 9295 - RNA, 1689 nt, Artificial Sequence
  derived and/or modified sequence opt3 from Rab__Homo_sapiens__AAC37580
auggccgcuagcgcaaagagaaaacaggaggaaaagcaccugaaaaugcucagggacaugaccggccuuccccauaaccggaagugcuucgauugugaccaacgcgggccuacauacgugaauaugacugucggauccuuuguuugcacgucuuguucagguagucugcgaggcuugaacccaccgcaccgugugaaaagcaucuccaugaccacauucacucagcaggagauugaauuuuuacagaagcaugggaaugagguaugcaagcaaauauggcugggacuauucgaugacagaucuucggccauccccgauuuuagggacccucagaaagugaaggaguuccuccaggaaaaauaugagaagaaacggugguacgucccacccgaacaggcgaaggugguugcuucagugcacgccagcauuaguggcuccucugcaagcuccaccucaaguacaccugaggucaagccacugaaaagccuucugggugauucugcccccaccuugcaucucaacaaggggacuccuucccaaucaccagugguaggacgcagccagggccagcagcaagagaaaaagcaguuugaccugcugagugaucucggcucugacaucuucgcugcaccggcuccccaguccacagccaccgccaauuuugcgaacuucgcacacuuuaauagccacgccgcucaaaacucggccaaugcagauuucgcuaacuuugacgccuucgggcagucuuccggaucaaguaauuucgguggcuuuccuacggcgagccauuccccauuccagccccagacuaccgggggaucugccgcaagcguuaacgcuaauuuugcccacuucgauaacuuuccuaaaucaaguuccgcugacuucggcacauuuaauacuagccaaucucaucagaccgccucagcagugaguaaggucagcacaaacaaagccgguuuacagaccgcugacaaguaugcggcacuggccaaccuugauaauauuuucuccgcugggcagggaggcgaccaaggcucuggguuuggaacgacugguaaggccccagugggcucgguggucagcguucccucccagucaagugcaucuagcgauaaauacgccgcuuuggccgaacuggacuccguguucucaagcgcagcgacaucuuccaacgcuuauaccaguacuagcaaugccucuuccaacguauuugggacagugccggucguggcaucagcccagacccagccugcuaguagcucgguucccgccccauucggagcaacgccuuccaccaaucccuuuguggcugccgcgggcccaucugucgccagcucaacaaaccccuuccaaacuaaugcuagaggugcaaccgccgcuacauucgggacugccaguauguccaugccuaccggcuuuggaacaccagcaccguacucucuacccaccagcuucuccggcucauuucagcagccugcguucccagcccaggcugccuuuccccaacagacugcauucagccagcaaccuaacggggcuggauuugccgcauucggucagacgaagccagugguaacacccuuuggccagguugccgcugcgggggugaguucuaauccguucaugaccggagccccuacuggccaguuuccaaccgguuccagcucgacaaaccccuuccucuga

SEQ ID NO: 9296 - RNA, 1689 nt, Artificial Sequence
  derived and/or modified sequence opt4 from Rab__Homo_sapiens__AAC37580
auggccgccagcgccaagagaaagcaggaggagaagcaccugaagaugcugagagacaugaccggccugccccacaacagaaagugcuucgacugcgaccagagaggccccaccuacgugaacaugaccgugggcagcuucgugugcaccagcugcagcggcagccugagaggccugaaccccccccacagagugaagagcaucagcaugaccaccuucacccagcaggagaucgaguuccugcagaagcacggcaacgaggugugcaagcagaucuggcugggccuguucgacgacagaagcagcgccauccccgacuucagagacccccagaaggugaaggaguuccugcaggagaaguacgagaagaagagaugguacgugccccccgagcaggccaaggugguggccagcgugcacgccagcaucagcggcagcagcgccagcagcaccagcagcacccccgaggugaagccccugaagagccugcugggcgacagcgcccccacccugcaccugaacaagggcacccccagccagagccccguggugggcagaagccagggccagcagcaggagaagaagcaguucgaccugcugagcgaccugggcagcgacaucuucgccgcccccgccccccagagcaccgccaccgccaacuucgccaacuucgcccacuucaacagccacgccgcccagaacagcgccaacgccgacuucgccaacuucgacgccuucggccagagcagcggcagcagcaacuucggcggcuuccccaccgccagccacagccccuuccagccccagaccaccggcggcagcgccgccagcgugaacgccaacuucgcccacuucgacaacuuccccaagagcagcagcgccgacuucggcaccuucaacaccagccagagccaccagaccgccagcgccgugagcaaggugagcaccaacaaggccggccugcagaccgccgacaaguacgccgcccuggccaaccuggacaacaucuucagcgccggccagggcggcgaccagggcagcggcuucggcaccaccggcaaggcccccgugggcagcguggugagcgugcccagccagagcagcgccagcagcgacaaguacgccgcccuggccgagcuggacagcguguucagcagcgccgccaccagcagcaacgccuacaccagcaccagcaacgccagcagcaacguguucggcaccgugcccgugguggccagcgcccagacccagcccgccagcagcagcgugcccgcccccuucggcgccacccccagcaccaaccccuucguggccgccgccggccccagcguggccagcagcaccaaccccuuccagaccaacgccagaggcgccaccgccgccaccuucggcaccgccagcaugagcaugcccaccggcuucggcacccccgcccccuacagccugcccaccagcuucagcggcagcuuccagcagcccgccuuccccgcccaggccgccuucccccagcagaccgccuucagccagcagcccaacggcgccggcuucgccgccuucggccagaccaagcccguggugacccccuucggccagguggccgccgccggcgugagcagcaaccccuucaugaccggcgcccccaccggccaguuccccaccggcagcagcagcaccaaccccuuccuguga

SEQ ID NO: 9297 - RNA, 1689 nt, Artificial Sequence
  derived and/or modified sequence opt5 from Rab__Homo_sapiens__AAC37580
auggccgcuagcgccaagagaaaacaggaggaaaagcaccugaaaaugcuccgggacaugaccggccugccccauaaccgcaagugcuucgauugugaccaaagagggccuacauacgugaauaugacggucggauccuuuguuugcaccucuuguagcggcucccuucgggggcugaacccgccccaccgcgugaaaucuaucagcaugacaaccuucacacagcaggagauugaauuucuccagaagcauggaaaugaggugugcaagcaaaucuggcugggccuuuucgaugacagauccucugcgauuccugauuuucgggacccccagaaagucaaggaguuccugcaggaaaaauaugagaagaaacgcugguacgugccucccgaacaggcuaagguuguggccagcguccacgccuccaucagcgggucuuccgcuagcucuaccuccagcacaccugaggugaagccgcucaaaucucugcugggagauuccgcccccacccuccaucugaacaagggcacgccuagccaaucccccguugugggcagaucucaggggcagcagcaagagaaaaagcaguuugaccuucugagcgaucucggauccgacauuuucgcugccccugcgccccagagcaccgccacagcuaauuuugccaacuucgcucacuuuaauucucacgccgcgcaaaacuccgccaaugcugauuucgccaacuuugacgcuuucggccagagcucugggagcuccaauuucggaggcuuuccgaccgccucucauagcccuuuccagccccagacaaccgggggauccgccgcuagcgucaacgcgaauuuugcccacuucgauaacuuuccuaaaucuuccagcgcugacuucggcacguuuaauacaucucaaucccaucagaccgccagcgccguguccaaggugucuacaaacaaagcuggccugcagaccgccgacaaguaugcggcucuugccaaccuggauaauaucuucagcgccgggcagggaggcgaccaaggguccggauuuggcaccacagggaaggcucccgucggaucuguugugagcgugcccucccagagcucugccuccagcgauaaauacgcugcccucgcggaacuggacucugucuucuccagcgccgcuacgucuagcaacgccuauaccuccacaagcaaugcuucuuccaacguguuuggcaccguuccuguggucgccagcgcgcagacacagccggccuccucuagcgugcccgcuccuuucggcgccacccccuccacgaauccuuuuguugcugccgccgggcccucuguggcuagcuccacaaacccguuccaaaccaaugcgcggggagccaccgcugccacauucggcaccgccucuaugagcaugccuacaggguuuggaacgcccgcuccuuacucccugcccaccagcuucucuggcuccuuucagcagccugccuuccccgcgcaggcugccuuuccgcaacagacagccuucagccagcaaccuaacggggcuggcuuugccgcguucggacagaccaagcccgucgugacacccuuuggccaggucgcugccgccggggugucuuccaauccuuucaugaccggagcuccgacgggccaguuucccaccgggucuagcuccacaaacccuuuccucuga

SEQ ID NO: 9298 - protein, 211 aa, Artificial Sequence
  Rac1__Homo_sapiens__A4D2P0
MQAIKCVVVGDGAVGKTCLLISYTTNAFPGEYIPTVFDNYSANVMVDGKPVNLGLWDTAGQEDYDRLRPLSYPQTVGETYGKDITSRGKDKPIADVFLICFSLVSPASFENVRAKWYPEVRHHCPNTPIILVGTKLDLRDDKDTIEKLKEKKLTPITYPQGLAMAKEIGAVKYLECSALTQRGLKTVFDEAIRAVLCPPPVKKRKRKCLLL

SEQ ID NO: 9299 - RNA, 636 nt, Artificial Sequence
  Rac1__Homo_sapiens__BAF84504
augcaggccaucaagugugugguggugggagacggagcuguagguaaaacuugccuacugaucaguuacacaaccaaugcauuuccuggagaauauaucccuacugucuuugacaauuauucugccaauguuaugguagauggaaaaccggugaaucugggcuuaugggauacagcuggacaagaagauuaugacagauuacgcccccuauccuauccgcaaacaguuggagaaacguacgguaaggauauaaccucccggggcaaagacaagccgauugccgauguguucuuaauuugcuuuucccuugugaguccugcaucauuugaaaauguccgugcaaagugguauccugaggugcggcaccacugucccaacacucccaucauccuagugggaacuaaacuugaucuuagggaugauaaagacacgaucgagaaacugaaggagaagaagcugacucccaucaccuauccgcagggucuagccauggcuaaggagauuggugcuguaaaauaccuggagugcucggcgcucacacagcgaggccucaagacaguguuugacgaagcgauccgagcaguccucugcccgccucccgugaagaagaggaagagaaaaugccugcuguuguaa

SEQ ID NO: 9300 - RNA, 636 nt, Artificial Sequence
  derived and/or modified sequence opt1 from Rac1__Homo_sapiens__BAF84504
augcaggccaucaagugcguggucgugggcgacggggccgugggcaagaccugccugcucaucagcuacaccacgaacgcguuccccggggaguacauccccaccgucuucgacaacuacuccgccaacgugaugguggacggcaagcccgucaaccuggggcugugggacaccgccggccaggaggacuacgaccgccuccggccccugagcuacccccagaccgugggcgagacguacgggaaggacaucaccucccgcggcaaggacaagccgaucgccgacguguuccugaucugcuucagccucgucucccccgccagcuucgagaacgugcgggcgaagugguaccccgaggugcgccaccacugccccaacaccccgaucauccuggucgggaccaagcuggaccuccgggacgacaaggacacgaucgagaagcugaaggagaagaagcugacccccaucaccuacccccagggccucgccauggccaaggagaucggggccgugaaguaccuggagugcuccgcgcugacccagcgcggccucaagacgguguucgacgaggccauccgggccguccugugcccgccgcccgugaagaagcgcaagcggaagugccugcuccuguga

SEQ ID NO: 9301 - RNA, 636 nt, Artificial Sequence
  derived and/or modified sequence opt2 from Rac1__Homo_sapiens__BAF84504
augcaggccaucaagugcgucgucgucggcgacggcgccgucggcaagaccugccuccucaucuccuacaccaccaacgccuuccccggcgaguacauccccaccgucuucgacaacuacuccgccaacgucauggucgacggcaagcccgucaaccucggccucugggacaccgccggccaggaggacuacgaccgccuccgcccccucuccuacccccagaccgucggcgagaccuacggcaaggacaucaccucccgcggcaaggacaagcccaucgccgacgucuuccucaucugcuucucccucgucucccccgccuccuucgagaacguccgcgccaagugguaccccgagguccgccaccacugccccaacacccccaucauccucgucggcaccaagcucgaccuccgcgacgacaaggacaccaucgagaagcucaaggagaagaagcucacccccaucaccuacccccagggccucgccauggccaaggagaucggcgccgucaaguaccucgagugcuccgcccucacccagcgcggccucaagaccgucuucgacgaggccauccgcgccguccucugccccccccccgucaagaagcgcaagcgcaagugccuccuccucuga

SEQ ID NO: 9302 - RNA, 636 nt, Artificial Sequence
  derived and/or modified sequence opt3 from Rac1__Homo_sapiens__BAF84504
augcaggccaucaagugcguggucguuggcgacggggcugugggaaaaaccugucugcucauuagcuacacaacuaacgcauuccccggugaguauauaccuacgguauuugauaauuacuccgccaacgugauggucgacggcaagccagugaaucuugggcugugggauaccgcgggacaagaagacuaugauagauugaggccguuaucuuacccccagacaguuggcgagacuuaugguaaagacaucaccucacgggggaaggauaaaccuauugcugacguguuccugaucugcuuuagucuagucagcccagccuccuucgaaaacgugcgcgcaaagugguaccccgagguacgacaccauuguccuaauacaccaauuauccucguuggaaccaagcuggaucuucgugacgauaaagacacuauagaaaagcugaaagagaagaaauugacacccaucaccuauccucagggccucgccauggcuaaggagauuggcgcagugaaguaccuggaaugcucugcccugacgcagagagggcucaaaacugucuuugaugaggcuaucagggccguguuauguccaccgcccgugaagaaacggaagcgcaaaugccugcuuuuguga

SEQ ID NO: 9303 - RNA, 636 nt, Artificial Sequence
  derived and/or modified sequence opt4 from Rac1__Homo_sapiens__BAF84504
augcaggccaucaagugcgugguggugggcgacggcgccgugggcaagaccugccugcugaucagcuacaccaccaacgccuuccccggcgaguacauccccaccguguucgacaacuacagcgccaacgugaugguggacggcaagcccgugaaccugggccugugggacaccgccggccaggaggacuacgacagacugagaccccugagcuacccccagaccgugggcgagaccuacggcaaggacaucaccagcagaggcaaggacaagcccaucgccgacguguuccugaucugcuucagccuggugagccccgccagcuucgagaacgugagagccaagugguaccccgaggugagacaccacugccccaacacccccaucauccuggugggcaccaagcuggaccugagagacgacaaggacaccaucgagaagcugaaggagaagaagcugacccccaucaccuacccccagggccuggccauggccaaggagaucggcgccgugaaguaccuggagugcagcgcccugacccagagaggccugaagaccguguucgacgaggccaucagagccgugcugugccccccccccgugaagaagagaaagagaaagugccugcugcuguga

SEQ ID NO: 9304 - RNA, 636 nt, Artificial Sequence
  derived and/or modified sequence opt5 from Rac1__Homo_sapiens__BAF84504
augcaggccaucaagugcguggucguuggcgacggggcugugggaaaaaccugucugcucauuagcuacacaacgaacgccuuccccggcgaguauaucccuaccguguuugauaauuacuccgcgaacgucaugguggacgggaagccgguuaaucugggacuuugggauacagcuggccaagaagacuaugauagacugcggccccucucuuacccucagaccgugggggagacauauggaaaagacauuaccagccgcggcaaggauaaacccaucgccgacgucuuccugauuugcuuuucccuugugucuccugccagcuucgaaaacguuagagcuaagugguaccccgaggugcggcaccauuguccuaauacaccgaucauccuggucggcaccaagcucgaucugcgcgacgauaaagacacgauugaaaagcugaaagagaagaaacucacccccaucacauauccucaggggcuggccauggcuaaggagauuggagccgugaaguaccuugaaugcuccgcgcugacccagagaggccucaaaacaguguuugaugaggccauccgggcuguccugugucccccucccguuaagaaacgcaagagaaaaugccuucugcucuga

SEQ ID NO: 9305 - protein, 192 aa, Artificial Sequence
  Rac1__Homo_sapiens__A4D2P1
MQAIKCVVVGDGAVGKTCLLISYTTNAFPGEYIPTVFDNYSANVMVDGKPVNLGLWDTAGQEDYDRLRPLSYPQTDVFLICFSLVSPASFENVRAKWYPEVRHHCPNTPIILVGTKLDLRDDKDTIEKLKEKKLTPITYPQGLAMAKEIGAVKYLECSALTQRGLKTVFDEAIRAVLCPPPVKKRKRKCLLL

SEQ ID NO: 9306 - RNA, 579 nt, Artificial Sequence
  Rac1__Homo_sapiens__BAF84495
augcaggccaucaagugugugguggugggagacggagcuguagguaaaacuugccuacugaucaguuacacaaccaaugcauuuccuggagaauauaucccuacugucuuugacaauuauucugccaauguuaugguagauggaaaaccggugaaucugggcuuaugggauacagcuggacaagaagauuaugacagauuacgcccccuauccuauccgcaaacagauguguucuuaauuugcuuuucccuugugaguccugcaucauuugaaaauguccgugcaaagugguauccugaggugcggcaccacugucccaacacucccaucauccuagugggaacuaaacuugaucuuagggaugauaaagacacgaucgagaaacugaaggagaagaagcugacucccaucaccuauccgcagggucuagccauggcuaaggagauuggugcuguaaaauaccuggagugcucggcgcucacacagcgaggccucaagacaguguuugacgaagcgauccgagcaguccucugcccgccucccgugaagaagaggaagagaaaaugccugcuguuguaa

SEQ ID NO: 9307 - RNA, 579 nt, Artificial Sequence
  derived and/or modified sequence opt1 from Rac1__Homo_sapiens__BAF84495
augcaggccaucaagugcguggucgugggcgacggggccgugggcaagaccugccugcucaucagcuacaccacgaacgcguuccccggggaguacauccccaccgucuucgacaacuacuccgccaacgugaugguggacggcaagcccgucaaccuggggcugugggacaccgccggccaggaggacuacgaccgccuccggccccugagcuacccccagaccgacguguuccugaucugcuucucccucgugagcccggccuccuucgagaacguccgcgccaagugguaccccgaggugcggcaccacugccccaacacgcccaucauccuggugggcaccaagcuggaccuccgcgacgacaaggacaccaucgagaagcugaaggagaagaagcugaccccgaucacguacccccaggggcucgcgauggccaaggagaucggcgccgucaaguaccuggagugcagcgcccugacccagcgggggcucaagaccguguucgacgaggcgauccgcgccgugcugugcccgccgcccgucaagaagcggaagcgcaagugccugcuccuguga

SEQ ID NO: 9308 - RNA, 579 nt, Artificial Sequence
  derived and/or modified sequence opt2 from Rac1__Homo_sapiens__BAF84495
augcaggccaucaagugcgucgucgucggcgacggcgccgucggcaagaccugccuccucaucuccuacaccaccaacgccuuccccggcgaguacauccccaccgucuucgacaacuacuccgccaacgucauggucgacggcaagcccgucaaccucggccucugggacaccgccggccaggaggacuacgaccgccuccgcccccucuccuacccccagaccgacgucuuccucaucugcuucucccucgucucccccgccuccuucgagaacguccgcgccaagugguaccccgagguccgccaccacugccccaacacccccaucauccucgucggcaccaagcucgaccuccgcgacgacaaggacaccaucgagaagcucaaggagaagaagcucacccccaucaccuacccccagggccucgccauggccaaggagaucggcgccgucaaguaccucgagugcuccgcccucacccagcgcggccucaagaccgucuucgacgaggccauccgcgccguccucugccccccccccgucaagaagcgcaagcgcaagugccuccuccucuga

SEQ ID NO: 9309 - RNA, 579 nt, Artificial Sequence
  derived and/or modified sequence opt3 from Rac1__Homo_sapiens__BAF84495
augcaggccaucaagugcguggucguuggcgacggggcugugggaaaaaccugucugcucauuagcuacacaacuaacgcauuccccggugaguauauaccuacgguauuugauaauuacuccgccaacgugauggucgacggcaagccagugaaucuugggcugugggauaccgcgggacaagaagacuaugauagauugaggccguuaucuuacccccagacagacguuuuccugaucugcuuuucacucgugaguccugcuagcuucgagaacguccgggccaaaugguauccagaagugcgccaccauugucccaauacuccuauuauccuaguaggcaccaagcuggaucuucgagacgauaaagacacaauugagaagcugaaggagaaaaaguugaccccaaucacuuacccccagggucucgcaauggccaaagaaauaggggcuguuaaguaucuggagugcuccgcacugacacagcguggacucaaaaccguguuugaugaagccaucagagcugucuuauguccuccaccggugaagaagaggaaacggaagugccugcuuuuguga

SEQ ID NO: 9310 - RNA, 579 nt, Artificial Sequence
  derived and/or modified sequence opt4 from Rac1__Homo_sapiens__BAF84495
augcaggccaucaagugcgugguggugggcgacggcgccgugggcaagaccugccugcugaucagcuacaccaccaacgccuuccccggcgaguacauccccaccguguucgacaacuacagcgccaacgugaugguggacggcaagcccgugaaccugggccugugggacaccgccggccaggaggacuacgacagacugagaccccugagcuacccccagaccgacguguuccugaucugcuucagccuggugagccccgccagcuucgagaacgugagagccaagugguaccccgaggugagacaccacugccccaacacccccaucauccuggugggcaccaagcuggaccugagagacgacaaggacaccaucgagaagcugaaggagaagaagcugacccccaucaccuacccccagggccuggccauggccaaggagaucggcgccgugaaguaccuggagugcagcgcccugacccagagaggccugaagaccguguucgacgaggccaucagagccgugcugugccccccccccgugaagaagagaaagagaaagugccugcugcuguga

SEQ ID NO: 9311 - RNA, 579 nt, Artificial Sequence
  derived and/or modified sequence opt5 from Rac1__Homo_sapiens__BAF84495
augcaggccaucaagugcguggucguuggcgacggggcugugggaaaaaccugucugcucauuagcuacacaacgaacgccuuccccggcgaguauaucccuaccguguuugauaauuacuccgcgaacgucaugguggacgggaagccgguuaaucugggacuuugggauacagcuggccaagaagacuaugauagacugcggccccucucuuacccucagaccgacguguuccugauuugcuuuagccuugucucccccgccucuuucgagaacgugcgcgccaaaugguauccugaaguuagacaccauugucccaauacaccuaucauucugguggggaccaagcucgaucugcgggacgauaaagacacaaucgagaagcugaaggagaaaaagcucaccccgaucacguacccccagggacuggcuauggccaaagaaauuggcgcugucaaguaucuugagugcagcgcccugacccagcgcggccucaaaacaguguuugaugaagcgaucagagccgugcuguguccucccccugucaagaagcggaaacgcaagugccuucugcucuga

SEQ ID NO: 9312 - protein, 148 aa, Artificial Sequence
  Rac1__Homo_sapiens__A4D2P2
MVDGKPVNLGLWDTAGQEDYDRLRPLSYPQTDVFLICFSLVSPASFENVRAKWYPEVRHHCPNTPIILVGTKLDLRDDKDTIEKLKEKKLTPITYPQGLAMAKEIGAVKYLECSALTQRGLKTVFDEAIRAVLCPPPVKKRKRKCLLL

SEQ ID NO: 9313 - RNA, 447 nt, Artificial Sequence
  Rac1__Homo_sapiens__EAL23720
augguagauggaaaaccggugaaucugggcuuaugggauacagcuggacaagaagauuaugacagauuacgcccccuauccuauccgcaaacagauguguucuuaauuugcuuuucccuugugaguccugcaucauuugaaaauguccgugcaaagugguauccugaggugcggcaccacugucccaacacucccaucauccuagugggaacuaaacuugaucuuagggaugauaaagacacgaucgagaaacugaaggagaagaagcugacucccaucaccuauccgcagggucuagccauggcuaaggagauuggugcuguaaaauaccuggagugcucggcgcucacacagcgaggccucaagacaguguuugacgaagcgauccgagcaguccucugcccgccucccgugaagaagaggaagagaaaaugccugcuguuguaa

SEQ ID NO: 9314 - RNA, 447 nt, Artificial Sequence
  derived and/or modified sequence opt1 from Rac1__Homo_sapiens__EAL23720
augguggacggcaagcccgucaaccuggggcucugggacaccgccggccaggaggacuacgaccgccugcggccccugagcuacccccagaccgacguguuccucaucugcuucucccuggugagccccgccuccuucgagaacguccgcgcgaagugguaccccgaggugcggcaccacugcccgaacacgcccaucauccugguggggaccaagcucgaccugcgcgacgacaaggacaccaucgagaagcugaaggagaagaagcucacccccaucacguacccccagggccuggccauggccaaggagaucggggccgucaaguaccuggagugcagcgcccucacccagcggggccugaagaccguguucgacgaggcgauccgcgccgugcugugcccgccgcccgucaagaagcggaagcgcaagugccuccugcuguga

SEQ ID NO: 9315 - RNA, 447 nt, Artificial Sequence
  derived and/or modified sequence opt2 from Rac1__Homo_sapiens__EAL23720
auggucgacggcaagcccgucaaccucggccucugggacaccgccggccaggaggacuacgaccgccuccgcccccucuccuacccccagaccgacgucuuccucaucugcuucucccucgucucccccgccuccuucgagaacguccgcgccaagugguaccccgagguccgccaccacugccccaacacccccaucauccucgucggcaccaagcucgaccuccgcgacgacaaggacaccaucgagaagcucaaggagaagaagcucacccccaucaccuacccccagggccucgccauggccaaggagaucggcgccgucaaguaccucgagugcuccgcccucacccagcgcggccucaagaccgucuucgacgaggccauccgcgccguccucugccccccccccgucaagaagcgcaagcgcaagugccuccuccucuga

SEQ ID NO: 9316 - RNA, 447 nt, Artificial Sequence
  derived and/or modified sequence opt3 from Rac1__Homo_sapiens__EAL23720
augguggacggcaagcccgucaaccuggggcucugggauaccgccggacaggaggacuacgauagacuuaggccucugagcuauccacaaacagacguuuucuugaucugcuuuuccuuagugucuccggcuucauucgaaaauguacgggcaaaaugguaccccgaggugcgccaccauuguccuaacacuccaauuauacuggucgguacgaagcuagaucuccgagacgauaaagacaccaucgaaaagcugaaagagaagaaacuuacacccauuacuuauccucagggccuggccauggcgaaggaaaucggggcugugaaguacuuggagugcagugcccucacccagcguggacugaaaacaguuuuugaugaggcaauuagagccgugcuguguccacccccugucaagaaaaggaagcggaagugccucuuacuguga

SEQ ID NO: 9317 - RNA, 447 nt, Artificial Sequence
  derived and/or modified sequence opt4 from Rac1__Homo_sapiens__EAL23720
augguggacggcaagcccgugaaccugggccugugggacaccgccggccaggaggacuacgacagacugagaccccugagcuacccccagaccgacguguuccugaucugcuucagccuggugagccccgccagcuucgagaacgugagagccaagugguaccccgaggugagacaccacugccccaacacccccaucauccuggugggcaccaagcuggaccugagagacgacaaggacaccaucgagaagcugaaggagaagaagcugacccccaucaccuacccccagggccuggccauggccaaggagaucggcgccgugaaguaccuggagugcagcgcccugacccagagaggccugaagaccguguucgacgaggccaucagagccgugcugugccccccccccgugaagaagagaaagagaaagugccugcugcuguga

SEQ ID NO: 9318 - RNA, 447 nt, Artificial Sequence
  derived and/or modified sequence opt5 from Rac1__Homo_sapiens__EAL23720
augguggacggcaagcccgucaaccuggggcucugggauaccgccggacaggaggacuacgauagacugcggccucuuagcuauccgcaaacagacguuuuccugaucugcuuuucccucgugucucccgcuagcuucgaaaaugugcgcgccaaaugguacccugaggucagacaccauugucccaacacgccuauuauccuggugggcaccaaacuugaucugcgggacgauaaggacacaauugaaaagcucaaagagaagaagcugacccccaucacauauccucaggggcuggcgauggcuaaagaaauuggagccguuaaguaccucgagugcuccgcccugacccagcgcggccuuaaaacaguguuugaugaggcuaucagagccguccuguguccgcccccugugaagaaacggaagcgcaagugccuccugcuuuga

SEQ ID NO: 9319 - protein, 192 aa, Artificial Sequence; identical to SEQ ID NO: 9305
  Rac1__Homo_sapiens__P63000

SEQ ID NO: 9320 - RNA, 579 nt, Artificial Sequence; identical to SEQ ID NO: 9306
  Rac1__Homo_sapiens__AAA36537

SEQ ID NO: 9321 - RNA, 579 nt, Artificial Sequence; identical to SEQ ID NO: 9307
  derived and/or modified sequence opt1 from Rac1__Homo_sapiens__AAA36537

SEQ ID NO: 9322 - RNA, 579 nt, Artificial Sequence; identical to SEQ ID NO: 9308
  derived and/or modified sequence opt2 from Rac1__Homo_sapiens__AAA36537

SEQ ID NO: 9323 - RNA, 579 nt, Artificial Sequence; identical to SEQ ID NO: 9309
  derived and/or modified sequence opt3 from Rac1__Homo_sapiens__AAA36537

SEQ ID NO: 9324 - RNA, 579 nt, Artificial Sequence; identical to SEQ ID NO: 9310
  derived and/or modified sequence opt4 from Rac1__Homo_sapiens__AAA36537

SEQ ID NO: 9325 - RNA, 579 nt, Artificial Sequence; identical to SEQ ID NO: 9311
  derived and/or modified sequence opt5 from Rac1__Homo_sapiens__AAA36537

SEQ ID NO: 9326 - protein, 156 aa, Artificial Sequence
  Rac1__Homo_sapiens__W0UV93
MALEKSLVRLLLLVLILLVLGWVQPSLGKESRAKKFQRQHMDSDSSPSSSSTYCNQMMRRRNMTQGRCKPVNTFVHEPLVDVQNVCFQEKVTCKNGQGNCYKSNSSMHITDCRLTNGSRYPNCAYRTSPKERHIIVACEGSPYVPVHFDASVEDST

SEQ ID NO: 9327 - RNA, 471 nt, Artificial Sequence
  Rac1__Homo_sapiens__CDG31913
auggcucuggagaagucucuuguccggcuccuucugcuuguccugauacugcuggugcugggcuggguccagccuucccugggcaaggaaucccgggccaagaaauuccagcggcagcauauggacucagacaguucccccagcagcagcuccaccuacuguaaccaaaugaugaggcgccggaauaugacacaggggcggugcaaaccagugaacaccuuugugcacgagccccugguagauguccagaaugucuguuuccaggaaaaggucaccugcaagaacgggcagggcaacugcuacaagagcaacuccagcaugcacaucacagacugccgccugacaaacggcuccagguaccccaacugugcauaccggaccagcccgaaggagagacacaucauuguggccugugaagggagcccauaugugccaguccacuuugaugcuucuguggaggacucuaccuaa

SEQ ID NO: 9328 - RNA, 471 nt, Artificial Sequence
  derived and/or modified sequence opt1 from Rac1__Homo_sapiens__CDG31913
auggcccuggagaagucccucgugcgccugcugcuccugguccugauccuccuggugcugggcugggugcagcccagccucgggaaggagagccgggccaagaaguuccagcgccagcacauggacuccgacagcuccccgagcuccagcuccaccuacugcaaccagaugaugcggcgccggaacaugacccagggccgcugcaagcccgucaacacguucgugcacgagccccugguggacguccagaacgugugcuuccaggagaaggugaccugcaagaacgggcagggcaacugcuacaagagcaacuccagcaugcacaucaccgacugccggcugaccaacgggucccgcuaccccaacugcgcguaccggacgagcccgaaggagcgccacaucaucgucgccugcgagggcucccccuacgugcccgugcacuucgacgccagcgucgaggacuccaccuga

SEQ ID NO: 9329 - RNA, 471 nt, Artificial Sequence
  derived and/or modified sequence opt2 from Rac1__Homo_sapiens__CDG31913
auggcccucgagaagucccucguccgccuccuccuccucguccucauccuccucguccucggcuggguccagcccucccucggcaaggagucccgcgccaagaaguuccagcgccagcacauggacuccgacuccucccccuccuccuccuccaccuacugcaaccagaugaugcgccgccgcaacaugacccagggccgcugcaagcccgucaacaccuucguccacgagccccucgucgacguccagaacgucugcuuccaggagaaggucaccugcaagaacggccagggcaacugcuacaaguccaacuccuccaugcacaucaccgacugccgccucaccaacggcucccgcuaccccaacugcgccuaccgcaccucccccaaggagcgccacaucaucgucgccugcgagggcucccccuacguccccguccacuucgacgccuccgucgaggacuccaccuga

SEQ ID NO: 9330 - RNA, 471 nt, Artificial Sequence
  derived and/or modified sequence opt3 from Rac1__Homo_sapiens__CDG31913
auggcccuggaaaagagccucgugagacuucuguuguuaguccugauccuacucguucugggcugggugcagcccucccuugggaaagagucuagggcuaagaaauuccaacggcagcacauggacucagauaguagcccuuccucuucgucaaccuacugcaaccagaugaugcgccgacguaauaugacacagggaagauguaagccaguaaacacuuuugugcaugagccgcuggucgacgugcaaaauguuugcuuccaggaaaaagugacguguaagaacggucagggcaauugcuauaagagcaacaguuccaugcacauuaccgauuguagguugacaaaugggucucgguaccccaacugcgcauaucgcacuagcccuaaagagagacauauaaucgucgccugugaaggauccccauacgugcccguacacuuugacgcgucaguugaggauaguaccuga

SEQ ID NO: 9331 - RNA, 471 nt, Artificial Sequence
  derived and/or modified sequence opt4 from Rac1__Homo_sapiens__CDG31913
auggcccuggagaagagccuggugagacugcugcugcuggugcugauccugcuggugcugggcugggugcagcccagccugggcaaggagagcagagccaagaaguuccagagacagcacauggacagcgacagcagccccagcagcagcagcaccuacugcaaccagaugaugagaagaagaaacaugacccagggcagaugcaagcccgugaacaccuucgugcacgagccccugguggacgugcagaacgugugcuuccaggagaaggugaccugcaagaacggccagggcaacugcuacaagagcaacagcagcaugcacaucaccgacugcagacugaccaacggcagcagauaccccaacugcgccuacagaaccagccccaaggagagacacaucaucguggccugcgagggcagccccuacgugcccgugcacuucgacgccagcguggaggacagcaccuga

SEQ ID NO: 9332 - RNA, 471 nt, Artificial Sequence
  derived and/or modified sequence opt5 from Rac1__Homo_sapiens__CDG31913
auggcccuggaaaagagccucgugagacugcuucugcucguccugauccuucugguucucggcugggugcagcccucccuggggaaagagucucgggcuaagaaauuccaacgccagcacauggacagcgauuccucuccuagcuccucuagcaccuacugcaaccagaugaugagacggcgcaauaugacacagggaagauguaagccggugaacacguuuguccaugagccccugguggacguucaaaaugugugcuuccaggaaaaagucaccuguaagaacggccaggggaauugcuauaaguccaacagcucuaugcacauuacagauugucggcucaccaauggaucccgcuacccuaacugcgccuauagaacaagccccaaagagcggcauaucauuguggcgugugaaggcucuccuuacguucccgugcacuuugacgcuuccgucgaggauagcaccuga

SEQ ID NO: 9333 - protein, 193 aa, Artificial Sequence
  RhoA__Homo_sapiens__A0A024R324
MAAIRKKLVIVGDGACGKTCLLIVFSKDQFPEVYVPTVFENYVADIEVDGKQVELALWDTAGQEDYDRLRPLSYPDTDVILMCFSIDSPDSLENIPEKWTPEVKHFCPNVPIILVGNKKDLRNDEHTRRELAKMKQEPVKPEEGRDMANRIGAFGYMECSAKTKDGVREVFEMATRAALQARRGKKKSGCLVL

SEQ ID NO: 9334 - RNA, 582 nt, Artificial Sequence
  RhoA__Homo_sapiens__EAW64978
auggcugccauccggaagaaacuggugauuguuggugauggagccuguggaaagacaugcuugcucauagucuucagcaaggaccaguucccagagguguaugugcccacaguguuugagaacuauguggcagauaucgagguggauggaaagcagguagaguuggcuuugugggacacagcugggcaggaagauuaugaucgccugaggccccucuccuacccagauaccgauguuauacugauguguuuuuccaucgacagcccugauaguuuagaaaacaucccagaaaaguggaccccagaagucaagcauuucugucccaacgugcccaucauccugguugggaauaagaaggaucuucggaaugaugagcacacaaggcgggagcuagccaagaugaagcaggagccggugaaaccugaagaaggcagagauauggcaaacaggauuggcgcuuuuggguacauggaguguucagcaaagaccaaagauggagugagagagguuuuugaaauggcuacgagagcugcucugcaagcuagacgugggaagaaaaaaucugggugccuugucuuguga

SEQ ID NO: 9335 - RNA, 582 nt, Artificial Sequence
  derived and/or modified sequence opt1 from RhoA__Homo_sapiens__EAW64978
auggccgccauccgcaagaagcuggugaucgucggcgacggggcgugcggcaagaccugccuccugaucguguucagcaaggaccaguuccccgagguguacgucccgaccguguucgagaacuacguggccgacaucgaggucgacgggaagcaggucgagcuggcccucugggacacggccggccaggaggacuacgaccggcugcgcccccugagcuaccccgacaccgacgugauccucaugugcuucagcaucgacucccccgacagccuggagaacaucccggagaaguggacccccgaggugaagcacuucugccccaacgugcccaucauccugguggggaacaagaaggaccuccggaacgacgagcacacccgccgggagcuggccaagaugaagcaggagccggucaagcccgaggagggccgcgacauggcgaaccggaucggcgccuucggguacauggagugcuccgccaagacgaaggacggcgugcgcgagguguucgagauggccacccgggcggcccugcaggcccgccgggggaagaagaaguccggcugccucguccuguga

SEQ ID NO: 9336 - RNA, 582 nt, Artificial Sequence
  derived and/or modified sequence opt2 from RhoA__Homo_sapiens__EAW64978
auggccgccauccgcaagaagcucgucaucgucggcgacggcgccugcggcaagaccugccuccucaucgucuucuccaaggaccaguuccccgaggucuacguccccaccgucuucgagaacuacgucgccgacaucgaggucgacggcaagcaggucgagcucgcccucugggacaccgccggccaggaggacuacgaccgccuccgcccccucuccuaccccgacaccgacgucauccucaugugcuucuccaucgacucccccgacucccucgagaacauccccgagaaguggacccccgaggucaagcacuucugccccaacguccccaucauccucgucggcaacaagaaggaccuccgcaacgacgagcacacccgccgcgagcucgccaagaugaagcaggagcccgucaagcccgaggagggccgcgacauggccaaccgcaucggcgccuucggcuacauggagugcuccgccaagaccaaggacggcguccgcgaggucuucgagauggccacccgcgccgcccuccaggcccgccgcggcaagaagaaguccggcugccucguccucuga

SEQ ID NO: 9337 - RNA, 582 nt, Artificial Sequence
  derived and/or modified sequence opt3 from RhoA__Homo_sapiens__EAW64978
auggccgcuaucagaaagaaacuggugauugucggcgacggggcaugcggaaagaccugucuccuuauaguuuucagcaaagaucaguuucccgagguguacguaccuacaguguucgaaaacuaugucgccgacaucgagguggaugguaagcaaguugaacuggcguugugggacacugcuggccaggaggauuacgacagguuacggccacuguccuauccggauacggacgugauucuaaugugcuuuucuaucgauucacccgacagucucgaaaauauuccugagaaauggaccccagaggucaagcacuucugucccaacgugccuaucauacugguagggaauaagaaagaucuucgcaacgacgaacauacacgacgugagcuggccaagaugaaacaggaaccaguuaagcccgaggagggaagagauauggcaaauaggaucggcgccuuugguuacauggaaugcagcgcuaaaacuaaggacggggugcgggaggucuucgaaauggcaacccgcgccgcuuugcaggccagaaggggaaagaaaaaguccggcugucucgugcuguga

SEQ ID NO: 9338 - RNA, 582 nt, Artificial Sequence
  derived and/or modified sequence opt4 from RhoA__Homo_sapiens__EAW64978
auggccgccaucagaaagaagcuggugaucgugggcgacggcgccugcggcaagaccugccugcugaucguguucagcaaggaccaguuccccgagguguacgugcccaccguguucgagaacuacguggccgacaucgagguggacggcaagcagguggagcuggcccugugggacaccgccggccaggaggacuacgacagacugagaccccugagcuaccccgacaccgacgugauccugaugugcuucagcaucgacagccccgacagccuggagaacauccccgagaaguggacccccgaggugaagcacuucugccccaacgugcccaucauccuggugggcaacaagaaggaccugagaaacgacgagcacaccagaagagagcuggccaagaugaagcaggagcccgugaagcccgaggagggcagagacauggccaacagaaucggcgccuucggcuacauggagugcagcgccaagaccaaggacggcgugagagagguguucgagauggccaccagagccgcccugcaggccagaagaggcaagaagaagagcggcugccuggugcuguga

SEQ ID NO: 9339 - RNA, 582 nt, Artificial Sequence
  derived and/or modified sequence opt5 from RhoA__Homo_sapiens__EAW64978
auggccgcuaucagaaagaaacuggugauugucggcgacggggccugcggaaagaccugucuccugaucguuuucagcaaagaucaguuucccgagguguacgugccuacagucuucgaaaacuauguggcggacauugagguugauggcaagcaaguggaacuugcucugugggacacggccgggcaggaggauuacgaccggcuccgcccgcuguccuaucccgauaccgacgucauccuuaugugcuuuucuauugauagcccugacucccuggaaaauauccccgagaaauggacaccugaggugaagcacuucugucccaacguuccuaucauucucgugggaaauaagaaagaucugagaaacgacgaacauacccggcgcgagcuggccaagaugaaacaggaaccggucaagcccgaggagggcagagauauggcuaaucggaucggggccuuuggauacauggaaugcucugcuaaaacaaaggacggcgugcgcgagguguucgaaauggccaccagagcggcccuccaggcucggcgcggcaagaaaaagagcgggugucugguccuuuga

SEQ ID NO: 9340 - protein, 193 aa, Artificial Sequence; identical to SEQ ID NO: 9333
  RhoA__Homo_sapiens__P61586

SEQ ID NO: 9341 - RNA, 582 nt, Artificial Sequence
  RhoA__Homo_sapiens__AAC33178
auggcugccauccggaagaaacuggugauuguuggugauggagccuguggaaagacaugcuugcucauagucuucagcaaggaccaguucccagagguguaugugcccacaguguuugagaacuauguggcagauaucgagguggauggaaagcagguagaguuggcuuugugggacacagcugggcaggaagauuaugaucgccugaggccccucuccuacccagauaccgauguuauacugauguguuuuuccaucgacagcccugauaguuuagaaaacaucccagaaaaguggaccccagaagucaagcauuucugucccaacgugcccaucauccugguugggaauaagaaggaucuucggaaugaugagcacacaaggcgggagcuagccaagaugaagcaggagccggugaaaccugaagaaggcagagauauggcaaacaggauuggcgcuuuuggguacauggaguguucagcaaagaccaaagauggagugagagagguuuuugaaauggcuacgagagcugcucugcaagcuagacgugggaagaaaaaaucugguugccuugucuuguga

SEQ ID NO: 9342 - RNA, 582 nt, Artificial Sequence; identical to SEQ ID NO: 9335
  derived and/or modified sequence opt1 from RhoA__Homo_sapiens__AAC33178

SEQ ID NO: 9343 - RNA, 582 nt, Artificial Sequence; identical to SEQ ID NO: 9336
  derived and/or modified sequence opt2 from RhoA__Homo_sapiens__AAC33178

SEQ ID NO: 9344 - RNA, 582 nt, Artificial Sequence; identical to SEQ ID NO: 9337
  derived and/or modified sequence opt3 from RhoA__Homo_sapiens__AAC33178

SEQ ID NO: 9345 - RNA, 582 nt, Artificial Sequence; identical to SEQ ID NO: 9338
  derived and/or modified sequence opt4 from RhoA__Homo_sapiens__AAC33178

SEQ ID NO: 9346 - RNA, 582 nt, Artificial Sequence; identical to SEQ ID NO: 9339
  derived and/or modified sequence opt5 from RhoA__Homo_sapiens__AAC33178

SEQ ID NO: 9347 - protein, 925 aa, Artificial Sequence
  RIG-I__Homo_sapiens__O95786
MTTEQRRSLQAFQDYIRKTLDPTYILSYMAPWFREEEVQYIQAEKNNKGPMEAATLFLKFLLELQEEGWFRGFLDALDHAGYSGLYEAIESWDFKKIEKLEEYRLLLKRLQPEFKTRIIPTDIISDLSECLINQECEEILQICSTKGMMAGAEKLVECLLRSDKENWPKTLKLALEKERNKFSELWIVEKGIKDVETEDLEDKMETSDIQIFYQEDPECQNLSENSCPPSEVSDTNLYSPFKPRNYQLELALPAMKGKNTIICAPTGCGKTFVSLLICEHHLKKFPQGQKGKVVFFANQIPVYEQQKSVFSKYFERHGYRVTGISGATAENVPVEQIVENNDIIILTPQILVNNLKKGTIPSLSIFTLMIFDECHNTSKQHPYNMIMFNYLDQKLGGSSGPLPQVIGLTASVGVGDAKNTDEALDYICKLCASLDASVIATVKHNLEELEQVVYKPQKFFRKVESRISDKFKYIIAQLMRDTESLAKRICKDLENLSQIQNREFGTQKYEQWIVTVQKACMVFQMPDKDEESRICKALFLYTSHLRKYNDALIISEHARMKDALDYLKDFFSNVRAAGFDEIEQDLTQRFEEKLQELESVSRDPSNENPKLEDLCFILQEEYHLNPETITILFVKTRALVDALKNWIEGNPKLSFLKPGILTGRGKTNQNTGMTLPAQKCILDAFKASGDHNILIATSVADEGIDIAQCNLVILYEYVGNVIKMIQTRGRGRARGSKCFLLTSNAGVIEKEQINMYKEKMMNDSILRLQTWDEAVFREKILHIQTHEKFIRDSQEKPKPVPDKENKKLLCRKCKALACYTADVRVIEECHYTVLGDAFKECFVSRPHPKPKQFSSFEKRAKIFCARQNCSHDWGIHVKYKTFEIPVIKIESFVVEDIATGVQTLYSKWKDFHFEKIPFDPAEMSK

SEQ ID NO: 9348 - RNA, 2778 nt, Artificial Sequence
  RIG-I__Homo_sapiens__AAI32787
augaccaccgagcagcgacgcagccugcaagccuuccaggauuauauccggaagacccuggacccuaccuacauccugagcuacauggcccccugguuuagggaggaagaggugcaguauauucaggcugagaaaaacaacaagggcccaauggaggcugccacacuuuuucucaaguuccuguuggagcuccaggaggaaggcugguuccguggcuuuuuggaugcccuagaccaugcagguuauucuggacuuuaugaagccauugaaaguugggauuucaaaaaaauugaaaaguuggaggaguauagauuacuuuuaaaacguuuacaaccagaauuuaaaaccagaauuaucccaaccgauaucauuucugaucugucugaauguuuaauuaaucaggaaugugaagaaauucuacagauuugcucuacuaaggggaugauggcaggugcagagaaauugguggaaugccuucucagaucagacaaggaaaacuggcccaaaacuuugaaacuugcuuuggagaaagaaaggaacaaguucagugaacuguggauuguagagaaagguauaaaagauguugaaacagaagaucuugaggauaagauggaaacuucugacauacagauuuucuaccaagaagauccagaaugccagaaucuuagugagaauucauguccaccuucagaagugucugauacaaacuuguacagcccauuuaaaccaagaaauuaccaauuagagcuugcuuugccugcuaugaaaggaaaaaacacaauaauaugugcuccuacagguuguggaaaaaccuuuguuucacugcuuauaugugaacaucaucuuaaaaaauucccacaaggacaaaaggggaaaguugucuuuuuugcgaaucagaucccaguguaugaacagcagaaaucuguauucucaaaauacuuugaaagacauggguauagaguuacaggcauuucuggagcaacagcugagaaugucccaguggaacagauuguugagaacaaugacaucaucauuuuaacuccacagauucuugugaacaaccuuaaaaagggaacgauuccaucacuauccaucuuuacuuugaugauauuugaugaaugccacaacacuaguaaacaacacccguacaauaugaucauguuuaauuaucuagaucagaaacuuggaggaucuucaggcccacugccccaggucauugggcugacugccucgguugguguuggggaugccaaaaacacagaugaagccuuggauuauaucugcaagcugugugcuucucuugaugcgucagugauagcaacagucaaacacaaucuggaggaacuggagcaaguuguuuauaagccccagaaguuuuucaggaaaguggaaucacggauuagcgacaaauuuaaauacaucauagcucagcugaugagggacacagagagucuggcaaagagaaucugcaaagaccucgaaaacuuaucucaaauucaaaauagggaauuuggaacacagaaauaugaacaauggauuguuacaguucagaaagcaugcaugguguuccagaugccagacaaagaugaagagagcaggauuuguaaagcccuguuuuuauacacuucacauuugcggaaauauaaugaugcccucauuaucagugagcaugcacgaaugaaagaugcucuggauuacuugaaagacuucuucagcaauguccgagcagcaggauucgaugagauugagcaagaucuuacucagagauuugaagaaaagcugcaggaacuagaaaguguuuccagggaucccagcaaugagaauccuaaacuugaagaccucugcuucaucuuacaagaagaguaccacuuaaacccagagacaauaacaauucucuuugugaaaaccagagcacuuguggacgcuuuaaaaaauuggauugaaggaaauccuaaacucaguuuucuaaaaccuggcauauugacuggacguggcaaaacaaaucagaacacaggaaugacccucccggcacagaaguguauauuggaugcauucaaagccaguggagaucacaauauucugauugccaccucaguugcugaugaaggcauugacauugcacagugcaaucuugucauccuuuaugaguaugugggcaaugucaucaaaaugauccaaaccagaggcagaggaagagcaagagguagcaagugcuuccuucugacuaguaaugcugguguaauugaaaaagaacaaauaaacauguacaaagaaaaaaugaugaaugacucuauuuuacgccuucagacaugggacgaagcaguauuuagggaaaagauucugcauauacagacucaugaaaaauucaucagagauagucaagaaaaaccaaaaccuguaccugauaaggaaaauaaaaaacugcucugcagaaagugcaaagccuuggcauguuacacagcugacguaagagugauagaggaaugccauuacacugugcuuggagaugcuuuuaaggaaugcuuugugaguagaccacaucccaagccaaagcaguuuucaaguuuugaaaaaagagcaaagauauucugugcccgacagaacugcagccaugacuggggaauccaugugaaguacaagacauuugagauuccaguuauaaaaauugaaaguuuugugguggaggauauugcaacuggaguucagacacuguacucgaaguggaaggacuuucauuuugagaagauaccauuugauccagcagaaauguccaaauga

SEQ ID NO: 9349 - RNA, 2778 nt, Artificial Sequence
  derived and/or modified sequence opt1 from RIG-I__Homo_sapiens__AAI32787
augaccaccgagcagcgccggagccugcaggccuuccaggacuacauccgcaagacgcucgaccccaccuacauccuguccuacauggccccgugguuccgggaggaggaggugcaguacauccaggcggagaagaacaacaagggccccauggaggccgccacccuguuccucaaguuccugcuggagcuccaggaggaggggugguuccgcggcuuccuggacgcccuggaccacgccggguacagcggccucuacgaggcgaucgaguccugggacuucaagaagaucgagaagcuggaggaguaccggcugcuccugaagcgccugcagcccgaguucaagacccggaucauccccacggacaucaucagcgaccucuccgagugccugaucaaccaggagugcgaggagauccugcagaucugcagcaccaaggggaugauggccggcgccgagaagcucgucgagugccugcugcgcuccgacaaggagaacuggccgaagacccucaagcuggcccuggagaaggagcggaacaaguucagcgagcucuggaucguggagaagggcaucaaggacguggagaccgaggaccuggaggacaagauggagacguccgacauccagaucuucuaccaggaggaccccgagugccagaaccugagcgagaacuccugcccgcccagcgaggucuccgacaccaaccucuacagccccuucaagccccgcaacuaccagcuggagcuggcgcuccccgccaugaaggggaagaacaccaucaucugcgcccccaccggcugcgggaagacguucgugucccugcugaucugcgagcaccaccucaagaaguucccgcagggccagaaggggaagguggucuucuucgccaaccagauccccguguacgagcagcagaaguccguguucagcaaguacuucgagcggcacggcuaccgcgucaccggcaucagcggggccaccgcggagaacgugcccguggagcagaucgucgagaacaacgacaucaucauccugacgccccagauccuggugaacaaccucaagaagggcaccaucccgucccugagcaucuucacccugaugaucuucgacgagugccacaacaccagcaagcagcaccccuacaacaugaucauguucaacuaccucgaccagaagcucgggggcuccagcggcccccugccccaggugaucgggcucaccgccuccgucggcgugggggacgccaagaacacggacgaggcccuggacuacaucugcaagcugugcgccagccucgacgcguccgugaucgccaccgucaagcacaaccuggaggagcuggagcaggucguguacaagccgcagaaguucuuccggaagguggagagccgcaucuccgacaaguucaaguacaucaucgcccagcucaugcgggacaccgagagccuggccaagcgcaucugcaaggaccuggagaaccugucccagauccagaaccgggaguucggcacccagaaguacgagcaguggaucgugacggugcagaaggccugcauggucuuccagaugcccgacaaggacgaggagagccgcaucugcaaggcgcuguuccuguacaccucccaccuccggaaguacaacgacgcccugaucaucagcgagcacgcccgcaugaaggacgcccuggacuaccugaaggacuucuucuccaacgugcgggccgcgggguucgacgagaucgagcaggaccucacccagcgcuucgaggagaagcugcaggagcuggagagcgucucccgcgaccccagcaacgagaaccccaagcucgaggaccugugcuucauccugcaggaggaguaccaccucaacccggagaccaucacgauccuguucgugaagacccgggcccugguggacgcccucaagaacuggaucgagggcaaccccaagcuguccuuccugaagcccggcauccucaccgggcgcggcaagaccaaccagaacacggggaugacccugcccgcccagaagugcauccuggacgcguucaaggccagcggcgaccacaacauccucaucgccaccuccgucgccgacgaggggaucgacaucgcccagugcaaccuggugauccuguacgaguacgugggcaacgucaucaagaugauccagacccggggccgcgggcgggcgcgcggcagcaagugcuuccuccugacgagcaacgccggggugaucgagaaggagcagaucaacauguacaaggagaagaugaugaacgacuccauccugcggcuccagaccugggacgaggccguguuccgcgagaagauccugcacauccagacccacgagaaguucauccgggacagccaggagaagccgaagcccguccccgacaaggagaacaagaagcugcucugccgcaagugcaaggcccuggccugcuacaccgcggacgugcgggugaucgaggagugccacuacaccguccugggcgacgccuucaaggagugcuucgugucccgcccgcaccccaagcccaagcaguucagcuccuucgagaagcgggccaagaucuucugcgcccgccagaacugcagccacgacugggggauccacgugaaguacaagacguucgagauccccgucaucaagaucgaguccuucgugguggaggacaucgccaccggcguccagacccucuacagcaaguggaaggacuuccacuucgagaagaucccguucgaccccgcggagauguccaaguga

SEQ ID NO: 9350 - RNA, 2778 nt, Artificial Sequence
  derived and/or modified sequence opt2 from RIG-I__Homo_sapiens__AAI32787
augaccaccgagcagcgccgcucccuccaggccuuccaggacuacauccgcaagacccucgaccccaccuacauccucuccuacauggcccccugguuccgcgaggaggagguccaguacauccaggccgagaagaacaacaagggccccauggaggccgccacccucuuccucaaguuccuccucgagcuccaggaggagggcugguuccgcggcuuccucgacgcccucgaccacgccggcuacuccggccucuacgaggccaucgaguccugggacuucaagaagaucgagaagcucgaggaguaccgccuccuccucaagcgccuccagcccgaguucaagacccgcaucauccccaccgacaucaucuccgaccucuccgagugccucaucaaccaggagugcgaggagauccuccagaucugcuccaccaagggcaugauggccggcgccgagaagcucgucgagugccuccuccgcuccgacaaggagaacuggcccaagacccucaagcucgcccucgagaaggagcgcaacaaguucuccgagcucuggaucgucgagaagggcaucaaggacgucgagaccgaggaccucgaggacaagauggagaccuccgacauccagaucuucuaccaggaggaccccgagugccagaaccucuccgagaacuccugcccccccuccgaggucuccgacaccaaccucuacucccccuucaagccccgcaacuaccagcucgagcucgcccuccccgccaugaagggcaagaacaccaucaucugcgcccccaccggcugcggcaagaccuucgucucccuccucaucugcgagcaccaccucaagaaguucccccagggccagaagggcaaggucgucuucuucgccaaccagauccccgucuacgagcagcagaaguccgucuucuccaaguacuucgagcgccacggcuaccgcgucaccggcaucuccggcgccaccgccgagaacguccccgucgagcagaucgucgagaacaacgacaucaucauccucaccccccagauccucgucaacaaccucaagaagggcaccauccccucccucuccaucuucacccucaugaucuucgacgagugccacaacaccuccaagcagcaccccuacaacaugaucauguucaacuaccucgaccagaagcucggcggcuccuccggcccccucccccaggucaucggccucaccgccuccgucggcgucggcgacgccaagaacaccgacgaggcccucgacuacaucugcaagcucugcgccucccucgacgccuccgucaucgccaccgucaagcacaaccucgaggagcucgagcaggucgucuacaagccccagaaguucuuccgcaaggucgagucccgcaucuccgacaaguucaaguacaucaucgcccagcucaugcgcgacaccgagucccucgccaagcgcaucugcaaggaccucgagaaccucucccagauccagaaccgcgaguucggcacccagaaguacgagcaguggaucgucaccguccagaaggccugcauggucuuccagaugcccgacaaggacgaggagucccgcaucugcaaggcccucuuccucuacaccucccaccuccgcaaguacaacgacgcccucaucaucuccgagcacgcccgcaugaaggacgcccucgacuaccucaaggacuucuucuccaacguccgcgccgccggcuucgacgagaucgagcaggaccucacccagcgcuucgaggagaagcuccaggagcucgaguccgucucccgcgaccccuccaacgagaaccccaagcucgaggaccucugcuucauccuccaggaggaguaccaccucaaccccgagaccaucaccauccucuucgucaagacccgcgcccucgucgacgcccucaagaacuggaucgagggcaaccccaagcucuccuuccucaagcccggcauccucaccggccgcggcaagaccaaccagaacaccggcaugacccuccccgcccagaagugcauccucgacgccuucaaggccuccggcgaccacaacauccucaucgccaccuccgucgccgacgagggcaucgacaucgcccagugcaaccucgucauccucuacgaguacgucggcaacgucaucaagaugauccagacccgcggccgcggccgcgcccgcggcuccaagugcuuccuccucaccuccaacgccggcgucaucgagaaggagcagaucaacauguacaaggagaagaugaugaacgacuccauccuccgccuccagaccugggacgaggccgucuuccgcgagaagauccuccacauccagacccacgagaaguucauccgcgacucccaggagaagcccaagcccguccccgacaaggagaacaagaagcuccucugccgcaagugcaaggcccucgccugcuacaccgccgacguccgcgucaucgaggagugccacuacaccguccucggcgacgccuucaaggagugcuucgucucccgcccccaccccaagcccaagcaguucuccuccuucgagaagcgcgccaagaucuucugcgcccgccagaacugcucccacgacuggggcauccacgucaaguacaagaccuucgagauccccgucaucaagaucgaguccuucgucgucgaggacaucgccaccggcguccagacccucuacuccaaguggaaggacuuccacuucgagaagauccccuucgaccccgccgagauguccaaguga

SEQ ID NO: 9351 - RNA, 2778 nt, Artificial Sequence
  derived and/or modified sequence opt3 from RIG-I__Homo_sapiens__AAI32787
augaccacagagcagagaaggagccugcaagccuuccaggacuacauccggaagacucucgaucccacguauauucuuuccuacauggcuccuugguuucgcgaagaggaagugcaguauauacaggcagagaaaaacaauaagggcccaauggaagccgcgacccuguucuugaaauuuuuacuggagcuacaagaggaagggugguuccgaggauuucucgacgcucuggaucacgccgguuacucuggccuuuaugaggcaaucgaaucaugggacuucaagaaaauugagaagcuggaggaauaccguuugcuccugaagagacugcagccggaguuuaaaacaaggaucauucccacugauaucauaagugaccucagcgaaugcuuaaucaaccaggagugugaagagauucugcagaucugcuccaccaaggggaugauggccggagcugagaaacuugucgaauguuugcugcggucugauaaggagaauuggccuaaaacacuaaagcucgcacuggaaaaggagcgcaacaaauucucggaacuuuggauuguugagaagggcaucaaagacguggagaccgaagaucuggaggacaagauggaaacuucagauauacaaaucuuuuaucaggaggacccagaaugccagaauuugagcgagaacaguugucccccuuccgagguaucugauacaaaucucuacagcccauucaaacccagaaacuaccagcuggaauuagcccugccugcuaugaaggguaaaaauaccauuauuugcgccccaacgggguguggaaagacuuuugugucccuccuuaucugcgagcaucaccugaagaaauucccgcaaggccagaagggcaaagucguguuuuucgcgaaccagauccccguuuaugaacaacagaagucaguguucaguaaauacuuugagaggcauggguaucgggucaccggaauuagcggugcaacagccgagaaugugccuguagaacagauaguugagaacaaugacaucauuaucuugacuccacagauacuggugaacaaucugaagaagggcaccauucccucucucuccaucuucacacugaugaucuuugacgaaugucacaacaccucaaaacaacauccuuacaacaugauuauguucaauuaucuugaucagaagcuagggggaagcaguggcccauugccccaggucaucggucucacggcuucugugggggugggagacgccaaaaacacugaugaggcacuggacuacauuugcaaguuaugugcuucccuggaugccagcgucauagcgacaguuaaacacaaucuagaggagcucgaacaggugguauauaagccgcaaaaguuuuuccgcaaaguggaaucgcgaaucucugacaaguuuaaauacauuaucgcccagcugaugagagauaccgagucccuugcaaagaggaucugcaaagacuuggaaaaccugucacagauucagaaucgggaguucggcacucaaaaguacgaacaguggauagucacagugcagaaggcuugcaugguuuuucagaugccugauaaagacgaggagagucguaucuguaaggcccucuuccuguauaccagccaccuucgcaaauacaacgaugcucugauuaucuccgaacaugccagaaugaaggacgcauuggacuaucucaaagacuuuuucucuaaugugagggccgcuggcuuugaugagauugaacaagaucugacgcagcgguucgaggaaaaguuacaggagcuggagagcgucucacgagaccccaguaacgaaaauccaaaacuagaggaucucugcuucauccugcaagaagaguaccaccuuaacccugagaccauaacaaucuuguuugugaagacucgcgcgcugguagacgcacucaagaauuggauugaagggaaccccaaacuguccuucuuaaagccaggaauccugaccgguagaggcaaaacaaaucagaacacugggaugacccuucccgcccagaaguguauuuuggaugcuuuuaaagccagcggagaccauaauauccucauagcaacaucuguugccgaugagggcauugacaucgcucagugcaaccuggugauucuauaugaauacgucgguaacgugaucaagaugauacaaaccagggggcggggccgcgccagaggaucaaaguguuuccugcucacgaguaaugcaggcgucaucgagaaagaacagauuaacauguauaaggagaaaaugaugaaugauagcauccugaggcuucagacuugggacgaggcgguguuucgugaaaagauuuugcacauccagacacacgagaaauucauacgggauucccaagaaaagccuaagccaguuccggacaaagagaacaagaaacuguuaugccgaaaguguaaagcucucgccugcuacaccgcagacgugagaguaauugaagagugucauuacacuguccugggggaugccuuuaaggagugcuucgugucuaggccccacccuaagccaaaacaguuuucgagcuucgaaaagcgcgcuaaaaucuuuugugcccggcagaauugcucccaugacuggggaauccacguuaaguauaaaaccuucgagauucccgugaucaagauugaaucauuugucguggaggauauagcaacagguguacagacccuuuacaguaaauggaaggacuuccauuucgaaaagaucccuuuugauccagcugagaugucuaaauga

SEQ ID NO: 9352 - RNA, 2778 nt, Artificial Sequence
  derived and/or modified sequence opt4 from RIG-I__Homo_sapiens__AAI32787
augaccaccgagcagagaagaagccugcaggccuuccaggacuacaucagaaagacccuggaccccaccuacauccugagcuacauggcccccugguucagagaggaggaggugcaguacauccaggccgagaagaacaacaagggccccauggaggccgccacccuguuccugaaguuccugcuggagcugcaggaggagggcugguucagaggcuuccuggacgcccuggaccacgccggcuacagcggccuguacgaggccaucgagagcugggacuucaagaagaucgagaagcuggaggaguacagacugcugcugaagagacugcagcccgaguucaagaccagaaucauccccaccgacaucaucagcgaccugagcgagugccugaucaaccaggagugcgaggagauccugcagaucugcagcaccaagggcaugauggccggcgccgagaagcugguggagugccugcugagaagcgacaaggagaacuggcccaagacccugaagcuggcccuggagaaggagagaaacaaguucagcgagcuguggaucguggagaagggcaucaaggacguggagaccgaggaccuggaggacaagauggagaccagcgacauccagaucuucuaccaggaggaccccgagugccagaaccugagcgagaacagcugcccccccagcgaggugagcgacaccaaccuguacagccccuucaagcccagaaacuaccagcuggagcuggcccugcccgccaugaagggcaagaacaccaucaucugcgcccccaccggcugcggcaagaccuucgugagccugcugaucugcgagcaccaccugaagaaguucccccagggccagaagggcaaggugguguucuucgccaaccagauccccguguacgagcagcagaagagcguguucagcaaguacuucgagagacacggcuacagagugaccggcaucagcggcgccaccgccgagaacgugcccguggagcagaucguggagaacaacgacaucaucauccugaccccccagauccuggugaacaaccugaagaagggcaccauccccagccugagcaucuucacccugaugaucuucgacgagugccacaacaccagcaagcagcaccccuacaacaugaucauguucaacuaccuggaccagaagcugggcggcagcagcggcccccugccccaggugaucggccugaccgccagcgugggcgugggcgacgccaagaacaccgacgaggcccuggacuacaucugcaagcugugcgccagccuggacgccagcgugaucgccaccgugaagcacaaccuggaggagcuggagcaggugguguacaagccccagaaguucuucagaaagguggagagcagaaucagcgacaaguucaaguacaucaucgcccagcugaugagagacaccgagagccuggccaagagaaucugcaaggaccuggagaaccugagccagauccagaacagagaguucggcacccagaaguacgagcaguggaucgugaccgugcagaaggccugcaugguguuccagaugcccgacaaggacgaggagagcagaaucugcaaggcccuguuccuguacaccagccaccugagaaaguacaacgacgcccugaucaucagcgagcacgccagaaugaaggacgcccuggacuaccugaaggacuucuucagcaacgugagagccgccggcuucgacgagaucgagcaggaccugacccagagauucgaggagaagcugcaggagcuggagagcgugagcagagaccccagcaacgagaaccccaagcuggaggaccugugcuucauccugcaggaggaguaccaccugaaccccgagaccaucaccauccuguucgugaagaccagagcccugguggacgcccugaagaacuggaucgagggcaaccccaagcugagcuuccugaagcccggcauccugaccggcagaggcaagaccaaccagaacaccggcaugacccugcccgcccagaagugcauccuggacgccuucaaggccagcggcgaccacaacauccugaucgccaccagcguggccgacgagggcaucgacaucgcccagugcaaccuggugauccuguacgaguacgugggcaacgugaucaagaugauccagaccagaggcagaggcagagccagaggcagcaagugcuuccugcugaccagcaacgccggcgugaucgagaaggagcagaucaacauguacaaggagaagaugaugaacgacagcauccugagacugcagaccugggacgaggccguguucagagagaagauccugcacauccagacccacgagaaguucaucagagacagccaggagaagcccaagcccgugcccgacaaggagaacaagaagcugcugugcagaaagugcaaggcccuggccugcuacaccgccgacgugagagugaucgaggagugccacuacaccgugcugggcgacgccuucaaggagugcuucgugagcagaccccaccccaagcccaagcaguucagcagcuucgagaagagagccaagaucuucugcgccagacagaacugcagccacgacuggggcauccacgugaaguacaagaccuucgagauccccgugaucaagaucgagagcuucgugguggaggacaucgccaccggcgugcagacccuguacagcaaguggaaggacuuccacuucgagaagauccccuucgaccccgccgagaugagcaaguga

SEQ ID NO: 9353 - RNA, 2778 nt, Artificial Sequence
  derived and/or modified sequence opt5 from RIG-I__Homo_sapiens__AAI32787
augaccacagagcagagacggagccugcaagccuuccaggacuacauccgcaagacgcucgaucccaccuauauucuguccuacauggcuccuugguuuagagaagaggaagugcaguauauccaggccgagaaaaacaauaagggcccgauggaagcggcuacacuuuuccugaaauuucuccuggagcuucaagaggaagggugguuccggggauuucuggacgcccucgaucacgccggcuacucugggcuguaugaggcuauugaaagcugggacuucaagaaaaucgagaagcuggaggaauaccgccuccugcuuaagagacugcagcccgaguuuaaaacccggauuaucccuacagauaucauuuccgaccucucugaaugccugaucaaccaggagugugaagagauucuucagaucugcagcaccaagggaaugauggccggcgcugagaaacuggucgaaugucuccugcgcuccgauaaggagaauuggcccaaaacacugaagcucgcccuggaaaaggagagaaacaaauucucugaacuuuggauuguugagaaggggaucaaagacguggagaccgaagaucuggaggacaagauggaaacgagcgauauucaaaucuuuuaucaggaggacccugaaugccagaaucucuccgagaacagcugucccccuucugagguguccgauaccaaucuguacagcccguucaaaccccggaacuaccagcuugaacuggcgcucccugccaugaaggggaaaaauacaaucauuugcgcucccaccggcuguggcaagacauuugucucucugcugaucugcgagcaucaccucaagaaauucccucaagggcagaagggaaaagugguguuuuucgccaaccagauucccguuuaugaacaacagaaguccgucuucagcaaauacuuugagcgccauggcuauagagugaccgggaucucuggagcuacggccgagaauguuccgguggaacagauugucgagaacaaugacaucaucauucugacaccucagauccuugugaacaaucugaagaagggcaccauucccucccucagcaucuucacacugaugauuuuugacgaaugucacaacaccuccaaacaacauccuuacaacaugaucauguucaauuaucuugaucagaagcugggaggaucuagcggcccccucccccaggugaucggccugaccgcguccgucgggguuggagacgccaaaaacacagaugaggcucuggacuacauuugcaagcucugugccagccuggaugcuucugugaucgccacggugaaacacaaucuugaggaacuggagcaggucguguauaagccucaaaaguuuuuccggaaaguugaaucccgcauuagcgacaaguuuaaauacaucauugcccagcucaugagagauaccgagucucuggcuaagcggaucugcaaagaccuggaaaaccuuagccagauucagaaucgcgaguucggcacacaaaaguacgaacaguggaucgugaccguccagaaggcgugcaugguguuucagaugccggauaaagacgaggaguccagaaucuguaaggcccucuuccuguauacaucucaucugcggaaauacaacgaugcucucauuaucagcgaacacgccagaaugaaggacgcccuggacuaucuuaaagacuuuuucuccaauguucgcgcugccggguuugaugagauugaacaagaucugacccagcgguucgaggaaaagcuccaggagcuggagagcgugucuagagaccccuccaacgaaaauccuaaacuggaggaucuuugcuucauccuccaagaagaguaccaccugaaccccgagacgauuacaauccuguuugucaagacccgcgcgcucguggacgcucugaagaauuggaucgaaggaaacccuaaacuuagcuuccugaagcccggcauucucaccgggcggggaaaaacaaaucagaacaccggcaugacacugccggcccagaaguguauccuggaugccuuuaaggcuucuggcgaccauaauauucuuaucgccacguccgucgcugaugaggggauugacaucgcccagugcaaccucgugauccuguaugaauacguuggaaacgugauuaaaaugauccaaaccagaggccgcgggcgggcgagaggaagcaaguguuuccugcucacauccaaugccggcgucauugagaaagaacagaucaacauguauaaggagaaaaugaugaaugauucuauucugcgccuucagaccugggacgaggcuguguuucgggaaaagauccugcacauccagacacacgagaaauucauuagagauagccaagaaaagccuaagcccguuccugacaaagagaacaagaaacuccugugccgcaaguguaaagcccuggcuugcuacaccgccgacgugcgggucaucgaagagugucauuacacggugcuuggggaugcguuuaaggagugcuucguguccagaccccacccuaagcccaaacaguuuucuagcuucgaaaagcgggccaaaaucuuuugugcucgccagaauugcucccaugacuggggcauucacguuaaguauaaaaccuucgagauuccggucaucaagauugagagcuuugugguggaagauaucgccacaggaguccagacccucuacucuaaauggaaggacuuccauuucgaaaagaucccuuuugaucccgcugagauguccaaauga

SEQ ID NO: 9354 - protein, 432 aa, Artificial Sequence
  RIG-I__Homo_sapiens__Q8IUD6
MAGLGLGSAVPVWLAEDDLGCIICQGLLDWPATLPCGHSFCRHCLEALWGARDARRWACPTCRQGAAQQPHLRKNTLLQDLADKYRRAAREIQAGSDPAHCPCPGSSSLSSAAARPRRRPELQRVAVEKSITEVAQELTELVEHLVDIVRSLQNQRPLSESGPDNELSILGKAFSSGVDLSMASPKLVTSDTAAGKIRDILHDLEEIQEKLQESVTWKEAPEAQMQGELLEAPSSSSCPLPDQSHPALRRASRFAQWAIHPTFNLKSLSCSLEVSKDSRTVTVSHRPQPYRWSCERFSTSQVLCSQALSSGKHYWEVDTRNCSHWAVGVASWEMSRDQVLGRTMDSCCVEWKGTSQLSAWHMVKETVLGSDRPGVVGIWLNLEEGKLAFYSVDNQEKLLYECTISASSPLYPAFWLYGLHPGNYLIIKQVKV

SEQ ID NO: 9355 - RNA, 1299 nt, Artificial Sequence
  RIG-I__Homo_sapiens__AAI26421
auggcgggccugggccugggcuccgccguucccguguggcuggccgaggacgaccucggcugcaucaucugccaggggcugcuggacuggcccgccacgcugcccugcggccacagcuucugccgccacugccuggaggcccuguggggcgcccgcgacgcccgccgcugggccugccccacuugccgccagggcgccgcgcagcagccgcaccugcggaagaacacgcuacugcaggaccuggccgacaaguaccgccgcgccgcacgcgagauacaggcgggcuccgacccugcccacugccccugcccgggcuccaguucccucuccagcgcggccgcgaggccccggcgccgcccggaacugcagcggguggcaguagagaagagcaucacagaaguugcucaggagcugacagagcugguggaacaucuuguagacauugucagaagccugcagaaucagaggccccuaucagaaucuggaccagacaacgaacugagcauccugggcaaggcuuuuucuucugggguggaucuuuccauggcuucuccaaagcuggugacuuccgacacagcugcagggaaaaucagagauauucuccaugaccuagaagaaauucaggaaaaauuacaagaaagcgucaccuggaaagaggcuccugaagcacaaaugcagggagaacuccuggaagccccgucuuccuccucaugcccauugccugaccagagccacccugcacucaggagagcuucucgguuugcucagugggccauccauccaaccuuuaacuugaagagccuuuccugcagccuggagguguccaaggauucccguacagugacugugucucaccgcccacaacccuaucgcuggagcugugagagguuuucuaccagccaggucuuauguucccaggcccugucuucuggaaagcauuacugggaaguggacacuaggaauugcagccacugggcaguugggguggcuuccugggagaugagccgcgaccagguccugggaaggacuauggacucuuguuguguggaauggaaggggacuagccagcucucugcauggcacauggucaaggaaacuguccuuggcucagacagaccugggguggugggcaucuggcugaaccuugaggagggaaagcuugccuucuauucaguggacaaucaggagaagcuucuguaugaguguaccaucucugccuccucuccuuuguacccugccuucuggcuguauggcuuacauccuggaaauuaccugauaauaaagcaaguaaagguguaa

SEQ ID NO: 9356 - RNA, 1299 nt, Artificial Sequence
  derived and/or modified sequence opt1 from RIG-I__Homo_sapiens__AAI26421
auggccggccuggggcucggcagcgccgugcccgucuggcuggcggaggacgaccuggggugcaucaucugccagggccuccuggacuggccggccacccugcccugcgggcacuccuucugccgccacugccucgaggcccuguggggcgcccgggacgcccgccggugggcgugcccgaccugccgccagggcgccgcccagcagccccaccuccggaagaacacgcugcugcaggaccuggccgacaaguaccgccgggcggcccgcgagauccaggccgggagcgaccccgcccacugccccugccccggcuccagcucccucagcuccgccgcggcccggccccgccggcgcccggagcugcagcggguggccguggagaaguccaucaccgaggucgcccaggagcugaccgagcucguggagcaccugguggacaucguccgcucccugcagaaccagcggccccucagcgaguccgggcccgacaacgagcugagcauccugggcaaggccuucuccagcgggguggaccucuccauggcgagccccaagcuggugaccuccgacacggccgccggcaagauccgcgacauccugcacgaccucgaggagauccaggagaagcugcaggagagcgucaccuggaaggaggccccggaggcccagaugcagggcgagcugcucgaggcgcccuccagcagcuccugcccccugcccgaccagagccacccggcccugcggcgcgccucccgguucgcccagugggccauccaccccaccuucaaccucaagagccuguccugcagccuggagguguccaaggacagccgcaccgugacggucucccaccggccccagcccuaccgcuggagcugcgagcgcuucuccaccagccaggugcucugcucccaggcgcugagcuccgggaagcacuacugggagguggacacccggaacugcagccacugggccgucggcguggccuccugggagaugagccgcgaccaggugcuggggcggaccauggacuccugcugcgucgaguggaagggcacgagccagcucagcgccuggcacauggugaaggagaccgugcugggcuccgaccgcccgggggucgugggcaucuggcugaaccucgaggaggggaagcuggcguucuacagcguggacaaccaggagaagcugcucuacgagugcaccaucuccgccagcagcccccuguaccccgccuucuggcuguacggccuccaccccgggaacuaccugaucaucaagcaggucaagguguga

SEQ ID NO: 9357 - RNA, 1299 nt, Artificial Sequence
  derived and/or modified sequence opt2 from RIG-I__Homo_sapiens__AAI26421
auggccggccucggccucggcuccgccguccccgucuggcucgccgaggacgaccucggcugcaucaucugccagggccuccucgacuggcccgccacccuccccugcggccacuccuucugccgccacugccucgaggcccucuggggcgcccgcgacgcccgccgcugggccugccccaccugccgccagggcgccgcccagcagccccaccuccgcaagaacacccuccuccaggaccucgccgacaaguaccgccgcgccgcccgcgagauccaggccggcuccgaccccgcccacugccccugccccggcuccuccucccucuccuccgccgccgcccgcccccgccgccgccccgagcuccagcgcgucgccgucgagaaguccaucaccgaggucgcccaggagcucaccgagcucgucgagcaccucgucgacaucguccgcucccuccagaaccagcgcccccucuccgaguccggccccgacaacgagcucuccauccucggcaaggccuucuccuccggcgucgaccucuccauggccucccccaagcucgucaccuccgacaccgccgccggcaagauccgcgacauccuccacgaccucgaggagauccaggagaagcuccaggaguccgucaccuggaaggaggcccccgaggcccagaugcagggcgagcuccucgaggcccccuccuccuccuccugcccccuccccgaccagucccaccccgcccuccgccgcgccucccgcuucgcccagugggccauccaccccaccuucaaccucaagucccucuccugcucccucgaggucuccaaggacucccgcaccgucaccgucucccaccgcccccagcccuaccgcugguccugcgagcgcuucuccaccucccagguccucugcucccaggcccucuccuccggcaagcacuacugggaggucgacacccgcaacugcucccacugggccgucggcgucgccuccugggagaugucccgcgaccagguccucggccgcaccauggacuccugcugcgucgaguggaagggcaccucccagcucuccgccuggcacauggucaaggagaccguccucggcuccgaccgccccggcgucgucggcaucuggcucaaccucgaggagggcaagcucgccuucuacuccgucgacaaccaggagaagcuccucuacgagugcaccaucuccgccuccuccccccucuaccccgccuucuggcucuacggccuccaccccggcaacuaccucaucaucaagcaggucaaggucuga

SEQ ID NO: 9358 - RNA, 1299 nt, Artificial Sequence
  derived and/or modified sequence opt3 from RIG-I__Homo_sapiens__AAI26421
auggccggccuggggcucggaagcgcugugcccgucuggcuugcagaggacgaucuggguugcaucauuugucagggcuuguuagacuggccugccacccugccaugcgggcacuccuucuguagacauugccuagaagcgcucuggggagcuagggaugcccggcgcugggcauguccgacaugccgacaaggcgccgcucagcagccccaucugcguaagaacacucuucugcaggacuuggcagauaaauacagaagggccgcucgggagauacaagccgguucugacccugcgcacuguccaugccccgggucaaguagccucuccucugcagccgcucgcccuagaaggcggccagaacugcagcgcguugccguggagaagucgaucacggaaguagcacaggagcugaccgagcucguggaacacuuagucgauauugugcgaucacugcagaaucaaagaccccuuagcgagaguggaccugacaacgaauuguccauccugggcaaggcuuuuucuagcggcguugaucuauccauggccucaccaaaacucgugacaagugacacugcggccgggaaaauuagggauauccugcaugaccuugaggagauacaggaaaagcugcaggagagcgucaccuggaaggaagcaccggaggcucagaugcaaggagaauugcucgaggcccccucuuccucaagcuguccucugccagaucagagucaccccgcuuuacggcgugccucucgcuucgcacagugggccauccacccuacauuuaaucugaaaucccucagcugcucgcuugaggugucuaaggacuccagaaccguaacuguuucacauaggccacaacccuaucgguggaguugugaacgauucagcacaucccaggugcugugcucucaggcuuugagcucagguaaacacuacugggaggucgacacccgcaacugcagucauugggcggugggcguggcauccugggaaaugagcagagaucagguccuagggaggacgauggacucuuguugcguugaguggaagggaacuucacaacugagugccuggcacauggugaaagaaaccguacucggcagcgaucggccggguguggucgggauuuggcugaaucuugaggagggaaagcuggcuuuuuauuccguggacaaccaggaaaaguugcucuacgaguguacaaucucugccucgagcccucuguaucccgcauucugguuauacggccugcacccaggcaauuaucuaauuaucaaacagguuaagguguga

SEQ ID NO: 9359 - RNA, 1299 nt, Artificial Sequence
  derived and/or modified sequence opt4 from RIG-I__Homo_sapiens__AAI26421
auggccggccugggccugggcagcgccgugcccguguggcuggccgaggacgaccugggcugcaucaucugccagggccugcuggacuggcccgccacccugcccugcggccacagcuucugcagacacugccuggaggcccuguggggcgccagagacgccagaagaugggccugccccaccugcagacagggcgccgcccagcagccccaccugagaaagaacacccugcugcaggaccuggccgacaaguacagaagagccgccagagagauccaggccggcagcgaccccgcccacugccccugccccggcagcagcagccugagcagcgccgccgccagacccagaagaagacccgagcugcagagaguggccguggagaagagcaucaccgagguggcccaggagcugaccgagcugguggagcaccugguggacaucgugagaagccugcagaaccagagaccccugagcgagagcggccccgacaacgagcugagcauccugggcaaggccuucagcagcggcguggaccugagcauggccagccccaagcuggugaccagcgacaccgccgccggcaagaucagagacauccugcacgaccuggaggagauccaggagaagcugcaggagagcgugaccuggaaggaggcccccgaggcccagaugcagggcgagcugcuggaggcccccagcagcagcagcugcccccugcccgaccagagccaccccgcccugagaagagccagcagauucgcccagugggccauccaccccaccuucaaccugaagagccugagcugcagccuggaggugagcaaggacagcagaaccgugaccgugagccacagaccccagcccuacagauggagcugcgagagauucagcaccagccaggugcugugcagccaggcccugagcagcggcaagcacuacugggagguggacaccagaaacugcagccacugggccgugggcguggccagcugggagaugagcagagaccaggugcugggcagaaccauggacagcugcugcguggaguggaagggcaccagccagcugagcgccuggcacauggugaaggagaccgugcugggcagcgacagacccggcguggugggcaucuggcugaaccuggaggagggcaagcuggccuucuacagcguggacaaccaggagaagcugcuguacgagugcaccaucagcgccagcagcccccuguaccccgccuucuggcuguacggccugcaccccggcaacuaccugaucaucaagcaggugaagguguga

SEQ ID NO: 9360 - RNA, 1299 nt, Artificial Sequence
  derived and/or modified sequence opt5 from RIG-I__Homo_sapiens__AAI26421
auggccggccuggggcucggaagcgcugugcccgucuggcuggccgaggacgaucuuggcugcaucauuugucaggggcugcucgacuggccugcgacccugccgugcggacacuccuucuguagacauugccuugaagcucuguggggcgcccgggaugcccgcagaugggcuugucccacaugccggcaaggggccgcucagcagccucaccuccgcaagaacacgcugcugcaggaccucgccgauaaauacagacgggcggcccgcgagauccaagcuggaucugaccccgcccauuguccuugccccggcagcuccucucugagcuccgcugccgcgagaccucggcgcagaccggaacuucagcggguugccguggagaagucuauuaccgaaguggcucaggagcugacagagcucgucgaacaccugguggauaucguucgcagccuucagaaucaaagaccccuguccgagagcggcccugacaacgaacucucuauucuggggaaagccuuuuccagcggaguggaucugucuauggcuucccccaagcucgucaccagcgacacagccgccggcaaaauccgggauauccugcaugaccuugaggagauucaggaaaagcugcaggagucugugaccuggaaggaagcuccugaggcgcagaugcaaggggaacuccuggaggcccccuccagcuccucuuguccgcuuccugaucagagccaccccgcucugcgcagagccucccgguucgcccagugggcuauccacccuacauuuaaucucaaaagccugucuugcucccuggagguuagcaaggacucuagaaccgugacggucagccaucgcccccaacccuaucggugguccugugaaagauucucuaccagccaggugcucugcucccaggcccugagcucuggaaaacacuacugggagguggacacacgcaacugcucccauugggcggucggcguugcuagcugggaaaugucucgggaucaggugcuugggagaaccauggacuccuguugcguggaguggaagggaacaagccaacuguccgccuggcacauggucaaagaaaccgugcucggcucugaucgcccuggcguuguggggauuuggcugaaucuugaggagggaaagcuggccuuuuauagcgucgacaaccaggaaaagcuccuguacgaguguacgaucuccgcuucuagcccgcuguaucccgccuucuggcucuacggccugcacccugggaauuaucuuauuaucaaacaggugaagguuuga

SEQ ID NO: 9361 - protein, 836 aa, Artificial Sequence
  Src-Kinases__Homo_sapiens__Q9H5V8
MAGLNCGVSIALLGVLLLGAARLPRGAEAFEIALPRESNITVLIKLGTPTLLAKPCYIVISKRHITMLSIKSGERIVFTFSCQSPENHFVIEIQKNIDCMSGPCPFGEVQLQPSTSLLPTLNRTFIWDVKAHKSIGLELQFSIPRLRQIGPGESCPDGVTHSISGRIDATVVRIGTFCSNGTVSRIKMQEGVKMALHLPWFHPRNVSGFSIANRSSIKRLCIIESVFEGEGSATLMSANYPEGFPEDELMTWQFVVPAHLRASVSFLNFNLSNCERKEERVEYYIPGSTTNPEVFKLEDKQPGNMAGNFNLSLQGCDQDAQSPGILRLQFQVLVQHPQNESNKIYVVDLSNERAMSLTIEPRPVKQSRKFVPGCFVCLESRTCSSNLTLTSGSKHKISFLCDDLTRLWMNVEKTISCTDHRYCQRKSYSLQVPSDILHLPVELHDFSWKLLVPKDRLSLVLVPAQKLQQHTHEKPCNTSFSYLVASAIPSQDLYFGSFCPGGSIKQIQVKQNISVTLRTFAPSFQQEASRQGLTVSFIPYFKEEGVFTVTPDTKSKVYLRTPNWDRGLPSLTSVSWNISVPRDQVACLTFFKERSGVVCQTGRAFMIIQEQRTRAEEIFSLDEDVLPKPSFHHHSFWVNISNCSPTSGKQLDLLFSVTLTPRTVDLTVILIAAVGGGVLLLSALGLIICCVKKKKKKTNKGPAVGIYNDNINTEMPRQPKKFQKGRKDNDSHVYAVIEDTMVYGHLLQDSSGSFLQPEVDTYRPFQGTMGVCPPSPPTICSRAPTAKLATEEPPPRSPPESESEPYTFSHPNNGDVSSKDTDIPLLNTQEPMEPAE

SEQ ID NO: 9362 - RNA, 2511 nt, Artificial Sequence
  Src-Kinases__Homo_sapiens__AAO34538
auggccggccugaacugcggggucucuaucgcacugcuagggguucugcugcugggugcggcgcgccugccgcgcggggcagaagcuuuugagauugcucugccacgagaaagcaacauuacaguucucauaaagcuggggaccccgacucugcuggcaaaacccuguuacaucgucauuucuaaaagacauauaaccauguuguccaucaagucuggagaaagaauagucuuuaccuuuagcugccagaguccugagaaucacuuugucauagagauccagaaaaauauugacuguaugucaggcccauguccuuuuggggagguucagcuucagcccucgacaucguuguugccuacccucaacagaacuuucaucugggaugucaaagcucauaagagcaucgguuuagagcugcaguuuuccaucccucgccugaggcagaucgguccgggugagagcugcccagacggagucacucacuccaucagcggccgaaucgaugccaccguggucaggaucggaaccuucugcagcaauggcacugugucccggaucaagaugcaagaaggagugaaaauggccuuacaccucccaugguuccaccccagaaaugucuccggcuucagcauugcaaaccgcucaucuauaaaacgucugugcaucaucgagucuguguuugagggugaaggcucagcaacccugaugucugccaacuacccagaaggcuucccugaggaugagcucaugacguggcaguuugucguuccugcacaccugcgggccagcgucuccuuccucaacuucaaccucuccaacugugagaggaaggaggagcggguugaauacuacaucccgggcuccaccaccaaccccgagguguucaagcuggaggacaagcagccugggaacauggcggggaacuucaaccucucucugcaaggcugugaccaagaugcccaaaguccagggauccuccggcugcaguuccaaguuuugguccaacauccacaaaaugaaagcaauaaaaucuacgugguugacuugaguaaugagcgagccaugucacucaccaucgagccacggcccgucaaacagagccgcaaguuugucccuggcuguuucgugugucuagaaucucggaccugcaguagcaaccucacccugacaucuggcuccaaacacaaaaucuccuuccuuugugaugaucugacacgucuguggaugaauguggaaaaaaccauaagcugcacagaccaccgguacugccaaaggaaauccuacucacuccaggugcccagugacauccuccaccugccuguggagcugcaugacuucuccuggaagcugcuggugcccaaggacaggcucagccuggugcuggugccagcccagaagcugcagcagcauacacacgagaagcccugcaacaccagcuucagcuaccucguggccagugccauacccagccaggaccuguacuucggcuccuucugcccgggaggcucuaucaagcagauccaggugaagcagaacaucucggugacccuucgcaccuuugcccccagcuuccaacaagaggccuccaggcagggucugacgguguccuuuauaccuuauuucaaagaggaaggcguuuucacggugaccccugacacaaaaagcaaggucuaccugaggacccccaacugggaccggggccugccaucccucaccucuguguccuggaacaucagcgugcccagagaccagguggccugccugacuuucuuuaaggagcggagcggcguggucugccagacagggcgcgcauucaugaucauccaggagcagcggacccgggcugaggagaucuucagccuggacgaggaugugcuccccaagccaagcuuccaccaucacagcuucugggucaacaucucuaacugcagccccacgagcggcaagcagcuagaccugcucuucucggugacacuuaccccaaggacuguggacuugacugucauccucaucgcagcggugggagguggagucuuacugcugucugcccucgggcucaucauuugcugugugaaaaagaagaaaaagaagacaaacaagggccccgcuguggguaucuacaaugacaacaucaauacugagaugccgaggcagccaaaaaaguuucagaaagggcgaaaggacaaugacucccauguguaugcagucaucgaggacaccaugguauaugggcaucugcuacaggauuccagcggcuccuuccugcagccagagguggacaccuaccggccguuccagggcaccaugggggucuguccucccuccccacccaccauaugcuccagggccccaacugcaaaguuggccacugaggagccaccuccucgcuccccuccugagucugagagugaaccguacaccuucucccaucccaacaauggggauguaagcagcaaggacacagacauucccuuacugaacacucaggagcccauggagccagcagaauaa

SEQ ID NO: 9363 - RNA, 2511 nt, Artificial Sequence
  derived and/or modified sequence opt1 from Src-Kinases__Homo_sapiens__AAO34538
auggccggccugaacugcggggugagcaucgcccuccugggcguccugcuccugggggcggcccgccugccccggggcgccgaggccuucgagaucgcccucccgcgcgaguccaacaucaccgugcugaucaagcuggggacccccacgcuccuggcgaagcccugcuacaucgugaucagcaagcggcacaucaccaugcuguccaucaagagcggcgagcgcaucgucuucaccuucuccugccagagccccgagaaccacuucgugaucgagauccagaagaacaucgacugcauguccggcccgugccccuucggggaggugcagcuccagcccagcaccucccugcugcccacgcucaaccggaccuucaucugggacgucaaggcccacaagagcaucggccuggagcugcaguucuccaucccgcgccuccggcagaucgggcccggcgagagcugccccgacggggugacccacuccaucagcggccgcaucgacgccaccgugguccggaucggcacguucugcuccaacgggaccgugagccgcaucaagaugcaggagggcgugaagauggcccugcaccuccccugguuccacccgcggaacgucuccggguucagcaucgcgaaccgcuccagcaucaagcggcugugcaucaucgagagcguguucgagggcgagggcuccgccacccugaugagcgccaacuaccccgagggguuccccgaggacgagcugaugaccuggcaguucgugguccccgcccaccuccgcgccuccgugagcuuccugaacuucaaccuguccaacugcgagcggaaggaggagcgcguggaguacuacaucccgggcagcacgaccaaccccgaggucuucaagcucgaggacaagcagcccgggaacauggcgggcaacuucaaccugucccugcaggggugcgaccaggacgcccagagccccggcauccuccggcugcaguuccaggugcuggugcagcacccgcagaacgaguccaacaagaucuacgucguggaccucagcaacgagcgcgccaugucccugaccaucgagccccggcccgugaagcagagccgcaaguucguccccggcugcuucgugugccuggagucccggaccugcagcuccaaccucacgcugaccagcggguccaagcacaagaucagcuuccugugcgacgaccucacccgccuguggaugaacgucgagaagaccaucuccugcacggaccaccgcuacugccagcgcaagagcuacagccuccaggugccguccgacauccugcaccuccccguggagcugcacgacuucagcuggaagcugcugguccccaaggaccggcugucccucgugcuggugcccgcccagaagcugcagcagcacacccacgagaagccgugcaacaccagcuucuccuaccuggucgccagcgcgauccccucccaggaccucuacuucggcagcuucugccccgggggcuccaucaagcagauccaggugaagcagaacaucagcgugacccugcggacguucgccccguccuuccagcaggaggccagccgccaggggcugaccgucuccuucauccccuacuucaaggaggagggcguguucaccgugacccccgacaccaagagcaaggucuaccuccggacgcccaacugggaccgcggccugccgucccugaccagcguguccuggaacaucagcgugccccgggaccaggucgccugccucaccuucuucaaggagcgcagcgggguggugugccagacgggccgggccuucaugaucauccaggagcagcgcacccgggcggaggagaucuucucccuggacgaggacguccugcccaagcccagcuuccaccaccacuccuucugggugaacaucagcaacugcuccccgaccagcgggaagcagcucgaccugcuguucuccgugacccucacgccccgcaccgucgaccugaccgugauccugaucgccgccgugggcgggggcguccuccugcugagcgcccucggccugaucaucugcugcgugaagaagaagaagaagaagaccaacaaggggcccgccgugggcaucuacaacgacaacaucaacaccgagaugccccggcagccgaagaaguuccagaaggggcgcaaggacaacgacucccacgucuacgcggugaucgaggacacgaugguguacggccaccuccugcaggacagcuccggcagcuuccugcagcccgaggucgacaccuaccggcccuuccaggggaccaugggcgugugcccgcccuccccgcccaccaucugcagccgcgcccccacggccaagcuggccaccgaggagcccccgccccgguccccgcccgagagcgaguccgagcccuacaccuucagccaccccaacaacggggacguguccagcaaggacaccgacaucccccuccugaacacgcaggagcccauggagcccgcggaguga

SEQ ID NO: 9364 - RNA, 2511 nt, Artificial Sequence
  derived and/or modified sequence opt2 from Src-Kinases__Homo_sapiens__AAO34538
auggccggccucaacugcggcgucuccaucgcccuccucggcguccuccuccucggcgccgcccgccucccccgcggcgccgaggccuucgagaucgcccucccccgcgaguccaacaucaccguccucaucaagcucggcacccccacccuccucgccaagcccugcuacaucgucaucuccaagcgccacaucaccaugcucuccaucaaguccggcgagcgcaucgucuucaccuucuccugccagucccccgagaaccacuucgucaucgagauccagaagaacaucgacugcauguccggccccugccccuucggcgagguccagcuccagcccuccaccucccuccuccccacccucaaccgcaccuucaucugggacgucaaggcccacaaguccaucggccucgagcuccaguucuccaucccccgccuccgccagaucggccccggcgaguccugccccgacggcgucacccacuccaucuccggccgcaucgacgccaccgucguccgcaucggcaccuucugcuccaacggcaccgucucccgcaucaagaugcaggagggcgucaagauggcccuccaccuccccugguuccacccccgcaacgucuccggcuucuccaucgccaaccgcuccuccaucaagcgccucugcaucaucgaguccgucuucgagggcgagggcuccgccacccucauguccgccaacuaccccgagggcuuccccgaggacgagcucaugaccuggcaguucgucguccccgcccaccuccgcgccuccgucuccuuccucaacuucaaccucuccaacugcgagcgcaaggaggagcgcgucgaguacuacauccccggcuccaccaccaaccccgaggucuucaagcucgaggacaagcagcccggcaacauggccggcaacuucaaccucucccuccagggcugcgaccaggacgcccagucccccggcauccuccgccuccaguuccagguccucguccagcacccccagaacgaguccaacaagaucuacgucgucgaccucuccaacgagcgcgccaugucccucaccaucgagccccgccccgucaagcagucccgcaaguucguccccggcugcuucgucugccucgagucccgcaccugcuccuccaaccucacccucaccuccggcuccaagcacaagaucuccuuccucugcgacgaccucacccgccucuggaugaacgucgagaagaccaucuccugcaccgaccaccgcuacugccagcgcaaguccuacucccuccagguccccuccgacauccuccaccuccccgucgagcuccacgacuucuccuggaagcuccucguccccaaggaccgccucucccucguccucguccccgcccagaagcuccagcagcacacccacgagaagcccugcaacaccuccuucuccuaccucgucgccuccgccauccccucccaggaccucuacuucggcuccuucugccccggcggcuccaucaagcagauccaggucaagcagaacaucuccgucacccuccgcaccuucgcccccuccuuccagcaggaggccucccgccagggccucaccgucuccuucauccccuacuucaaggaggagggcgucuucaccgucacccccgacaccaaguccaaggucuaccuccgcacccccaacugggaccgcggccuccccucccucaccuccgucuccuggaacaucuccgucccccgcgaccaggucgccugccucaccuucuucaaggagcgcuccggcgucgucugccagaccggccgcgccuucaugaucauccaggagcagcgcacccgcgccgaggagaucuucucccucgacgaggacguccuccccaagcccuccuuccaccaccacuccuucugggucaacaucuccaacugcucccccaccuccggcaagcagcucgaccuccucuucuccgucacccucaccccccgcaccgucgaccucaccgucauccucaucgccgccgucggcggcggcguccuccuccucuccgcccucggccucaucaucugcugcgucaagaagaagaagaagaagaccaacaagggccccgccgucggcaucuacaacgacaacaucaacaccgagaugccccgccagcccaagaaguuccagaagggccgcaaggacaacgacucccacgucuacgccgucaucgaggacaccauggucuacggccaccuccuccaggacuccuccggcuccuuccuccagcccgaggucgacaccuaccgccccuuccagggcaccaugggcgucugcccccccuccccccccaccaucugcucccgcgcccccaccgccaagcucgccaccgaggagccccccccccgcuccccccccgaguccgaguccgagcccuacaccuucucccaccccaacaacggcgacgucuccuccaaggacaccgacaucccccuccucaacacccaggagcccauggagcccgccgaguga

SEQ ID NO: 9365 - RNA, 2511 nt, Artificial Sequence
  derived and/or modified sequence opt3 from Src-Kinases__Homo_sapiens__AAO34538
auggccggccugaacugcggggugagcaucgcucuccuuggaguccuguuguuaggugcagccagacugcccaggggcgcggaggcuuucgaaauugcccuaccucgggaguccaauauaaccguucucaucaagcuggggacaccaacucuucuggcaaaaccguguuacauugugaucucuaagcgccacauuacgauguugucaaucaaaaguggagaacgaauaguauuuaccuucagcugccagucccccgagaaccauuuugugaucgaaauucaaaagaauaucgacuguaugucuggcccuugcccauucggugagguccagcuccagcccucgacaucacugcugccuacucucaaccguaccuuuauuugggaugugaaagcccacaagagcaucggguuagagcugcaguucaguauaccaagacuuaggcaaauuggacccggcgaauccuguccugacggcguuacacauucuaucagcgggcggauugaugcuaccgugguccgcaucggaacuuuuugcuccaaugguacagugucaagaaucaagaugcaggagggcguaaaaauggcauugcaucugccaugguuccacccgaggaacguuaguggguuuagcauugccaaucggucuuccauaaagcgccuauguaucauugaaucaguguucgagggagagggcagcgcuacccucaugagugccaacuaucccgaagguuuuccugaggacgaacugaugacguggcaguucgucgugccagcgcaccuucgagcaucuguguccuuucugaauuucaacuugagcaauugcgagagaaaagaagagagggucgaguacuauauccccgggucgacuaccaacccugaaguuuucaagcucgaggauaaacagccaggaaauauggccggcaacuuuaaucugucuuuacaaggcugugaccaggaugcucagucccccgggauacugcggcuccaguuccaagugcuuguacagcacccgcagaacgaaucaaacaagauuuacguggucgaccugaguaaugagcgugccaugagcuugacaaucgaaccucgccccgugaagcaauccagaaaauuuguuccaggaugcuucgugugucuagagucuaggacuugcagcucaaaccugacccucacaagugguuccaagcauaaaaucagcuuucugugcgaugaccuuacccggcuguggaugaaugucgagaagacgauuucuuguacugaucaccgauauugccagcgcaaaucauacagucuccaggugccuagcgacaucuugcaucugcccguagaauuacacgauuucuccuggaagcugcuaguuccaaaagacagacucucucuggugcuuguccccgcacagaaguugcaacagcacacacaugagaagccuuguaacaccucguuuagcuaucugguggcuuccgccauuccaucacaggaccucuacuucggcaguuuuugccccgggggaucuauaaaacagauccaagucaagcagaauauuagcgugacucugaggacauucgcgcccuccuuucagcaggaagccucacggcaaggccuuaccguuagcuucaucccuuacuuuaaagaggaagguguguucacgguaaccccagauacaaagucuaaagucuaucugcgcacucccaacugggacagaggguugccuucccucaccagugugagcuggaauaucucuguuccaagggaucagguggcaugucugacauucuuuaaggagcguuccggcgucgugugccagacuggacgggcuuucaugauuauacaggagcaacgaaccagagccgaagagaucuuuucauuagacgaagauguacugcccaagccgaguuuccaccaucacagcuuuugggugaacauuucgaauuguuccccuacaucuggcaaacagcuagaccuccuguucagcguuacccuuacuccaaggacggucgauuugacagugauccugauugcugccgucgggggaggugugcuccuguuaucagcacugggccuuaucauaugcuguguuaagaaaaagaaaaagaagaccaacaaagggcccgccgugggaaucuacaaugacaacauuaauacugagaugccucgccagcccaagaaauuucaaaagggccggaaagauaacgacagucauguguaugcuguaaucgaggauaccauggucuacggucacuugcuccaggacuccucugggagcuuccugcagccagaaguggacacauauagaccuuuucagggcaccaugggaguuugcccgccauccccgccuacuauuuguucaagggcgcccacagcaaagcuagccacggaggaaccacccccucgcagcccacccgagagugaaucugagccuuacaccuucucccacccgaauaacggcgaugugagcucgaaggacacugauaucccacugcucaacacacaagagcccauggaaccugcugaguga

SEQ ID NO: 9366 - RNA, 2511 nt, Artificial Sequence
  derived and/or modified sequence opt4 from Src-Kinases__Homo_sapiens__AAO34538
auggccggccugaacugcggcgugagcaucgcccugcugggcgugcugcugcugggcgccgccagacugcccagaggcgccgaggccuucgagaucgcccugcccagagagagcaacaucaccgugcugaucaagcugggcacccccacccugcuggccaagcccugcuacaucgugaucagcaagagacacaucaccaugcugagcaucaagagcggcgagagaaucguguucaccuucagcugccagagccccgagaaccacuucgugaucgagauccagaagaacaucgacugcaugagcggccccugccccuucggcgaggugcagcugcagcccagcaccagccugcugcccacccugaacagaaccuucaucugggacgugaaggcccacaagagcaucggccuggagcugcaguucagcauccccagacugagacagaucggccccggcgagagcugccccgacggcgugacccacagcaucagcggcagaaucgacgccaccguggugagaaucggcaccuucugcagcaacggcaccgugagcagaaucaagaugcaggagggcgugaagauggcccugcaccugcccugguuccaccccagaaacgugagcggcuucagcaucgccaacagaagcagcaucaagagacugugcaucaucgagagcguguucgagggcgagggcagcgccacccugaugagcgccaacuaccccgagggcuuccccgaggacgagcugaugaccuggcaguucguggugcccgcccaccugagagccagcgugagcuuccugaacuucaaccugagcaacugcgagagaaaggaggagagaguggaguacuacauccccggcagcaccaccaaccccgagguguucaagcuggaggacaagcagcccggcaacauggccggcaacuucaaccugagccugcagggcugcgaccaggacgcccagagccccggcauccugagacugcaguuccaggugcuggugcagcacccccagaacgagagcaacaagaucuacgugguggaccugagcaacgagagagccaugagccugaccaucgagcccagacccgugaagcagagcagaaaguucgugcccggcugcuucgugugccuggagagcagaaccugcagcagcaaccugacccugaccagcggcagcaagcacaagaucagcuuccugugcgacgaccugaccagacuguggaugaacguggagaagaccaucagcugcaccgaccacagauacugccagagaaagagcuacagccugcaggugcccagcgacauccugcaccugcccguggagcugcacgacuucagcuggaagcugcuggugcccaaggacagacugagccuggugcuggugcccgcccagaagcugcagcagcacacccacgagaagcccugcaacaccagcuucagcuaccugguggccagcgccauccccagccaggaccuguacuucggcagcuucugccccggcggcagcaucaagcagauccaggugaagcagaacaucagcgugacccugagaaccuucgcccccagcuuccagcaggaggccagcagacagggccugaccgugagcuucauccccuacuucaaggaggagggcguguucaccgugacccccgacaccaagagcaagguguaccugagaacccccaacugggacagaggccugcccagccugaccagcgugagcuggaacaucagcgugcccagagaccagguggccugccugaccuucuucaaggagagaagcggcguggugugccagaccggcagagccuucaugaucauccaggagcagagaaccagagccgaggagaucuucagccuggacgaggacgugcugcccaagcccagcuuccaccaccacagcuucugggugaacaucagcaacugcagccccaccagcggcaagcagcuggaccugcuguucagcgugacccugacccccagaaccguggaccugaccgugauccugaucgccgccgugggcggcggcgugcugcugcugagcgcccugggccugaucaucugcugcgugaagaagaagaagaagaagaccaacaagggccccgccgugggcaucuacaacgacaacaucaacaccgagaugcccagacagcccaagaaguuccagaagggcagaaaggacaacgacagccacguguacgccgugaucgaggacaccaugguguacggccaccugcugcaggacagcagcggcagcuuccugcagcccgagguggacaccuacagacccuuccagggcaccaugggcgugugcccccccagcccccccaccaucugcagcagagcccccaccgccaagcuggccaccgaggagcccccccccagaagcccccccgagagcgagagcgagcccuacaccuucagccaccccaacaacggcgacgugagcagcaaggacaccgacaucccccugcugaacacccaggagcccauggagcccgccgaguga

SEQ ID NO: 9367 - RNA, 2511 nt, Artificial Sequence
  derived and/or modified sequence opt5 from Src-Kinases__Homo_sapiens__AAO34538
auggccggccugaacugcggggugagcaucgcucuccugggaguccuucugcucggcgccgcgagacugccccggggagcugaggccuucgaaauugcccuuccucgcgaguccaauaucaccguucugauuaagcucggaacaccgacgcugcuggcuaaacccuguuacaucgugauuucuaagagacacaucaccaugcucagcaucaaauccggcgaacggauuguguuuacauucucuugccagagcccugagaaccacuuugucaucgaaauucaaaagaauaucgacuguauguccgggcccugcccuuucggagaggugcagcugcagcccucuaccagccuucugccuacacucaaccgcaccuuuauuugggauguuaaagcccacaaguccaucggccuggagcuucaguucagcauuccgagacugcggcaaaucggccccggggaaucuuguccugacggagugacacauuccaucagcggccgcauugaugcuaccgucgugagaaucgggacguuuugcucuaauggaaccguuucccggauuaagaugcaggagggcgugaaaauggcccuccaucugcccugguuccacccucgcaacgucagcggguuuucuaucgcgaauagauccagcauuaagcggcuguguaucaucgaauccguguucgagggagagggcucugccacacucaugagcgcuaacuaucccgaaggcuuuccggaggacgaacugaugaccuggcaguucguggucccugcccaccuucgcgcuuccguuagcuuucugaauuucaaccucucuaauugcgagagaaaagaggaacggguggaguacuauauucccggguccacaaccaacccugaaguguucaagcuggaggauaaacagcccggaaauauggccggcaacuuuaaucuuagccugcaagggugugaccaggaugcgcagucucccggaauccuccgccugcaguuccaaguccuggugcagcacccucagaacgaaagcaacaagauuuacguuguggaccucuccaaugagagagccaugucucugacgaucgaaccgcggcccgucaagcaaagcagaaaauuugugccuggcugcuucguuugucuugagucccgcacaugcagcucuaaccugacccucacauccgggagcaagcauaaaauuucuuuucugugcgaugaccuuacccggcuguggaugaauguggagaagaccaucuccuguacagaucacagauauugccagcgcaaaagcuacucccuccagguccccucugacauccugcaucugccuguggaacuccacgauuucagcuggaagcugcuuguccccaaagaccggcugucccucgugcugguuccggcucagaagcugcaacagcacacgcaugagaagccuuguaacaccucuuuuagcuaucuuguggccuccgcuauucccagccaggaccucuacuucggaucuuuuugcccuggcggcuccaucaaacagauucaagucaagcagaauaucagcgugacacugagaaccuucgcccccucuuuucagcaggaagccucccgccaagggcugacaguuagcuucauuccuuacuuuaaagaggaaggaguguucaccgucacgcccgauacaaagucuaaaguguaucuccggaccccgaacugggacagaggccugccuagccuuaccuccgugagcuggaauaucucuguuccccgcgaucaggucgcuugucugacauucuuuaaggagcgguccgggguggugugccagaccgggagagcguucaugauuauccaggagcaacgcacacgggccgaagagaucuuuagccucgacgaagauguccugcccaagccuuccuuccaccaucacucuuuuugggugaacauuagcaauuguuccccgacgucuggcaaacagcuggaccuucucuucagcguuacccugacacccagaaccguggaucugacagucauccucauugcugccgugggaggcggaguucugcuucuguccgcccucggccugaucauuugcugugugaagaaaaagaaaaagaagaccaacaaagggccugcugucggaaucuacaaugacaacaucaauacggagaugccccggcagccuaagaaauuucaaaagggccgcaaagauaacgacucucauguguaugccguuauugaggauaccaugguguacgggcaucugcuucaggacagcuccgggagcuuccuccagcccgaagucgacacauauagaccuuuucagggcaccaugggggugugucccccgucuccucccacaaucugcucccgggcgccuaccgcuaagcuggccacggaggaacccccgccuagaucucccccugagagcgaauccgagcccuacacauucagccaccccaauaacggcgaugugucuuccaaggacaccgauauuccucugcucaacacacaagagccgauggaacccgccgaguga

SEQ ID NO: 9368 - protein, 248 aa, Artificial Sequence
  Surfactant_protein_A__Homo_sapiens__Q8IWL1
MWLCPLALNLILMAASGAACEVKDVCVGSPGIPGTPGSHGLPGRDGRDGVKGDPGPPGPMGPPGETPCPPGNNGLPGAPGVPGERGEKGEAGERGPPGLPAHLDEELQATLHDFRHQILQTRGALSLQGSIMTVGEKVFSSNGQSITFDAIQEACARAGGRIAVPRNPEENEAIASFVKKYNTYAYVGLTEGPSPGDFRYSDGTPVNYTNWYRGEPAGRGKEQCVEMYTDGQWNDRNCLYSRLTICEF

SEQ ID NO: 9369 - RNA, 747 nt, Artificial Sequence
  Surfactant_protein_A__Homo_sapiens__AAI57867
auguggcugugcccucuggcccucaaccucaucuugauggcagccucuggugcugcgugcgaagugaaggacguuuguguuggaagcccugguauccccggcacuccuggaucccacggccugccaggcagggacgggagagauggugucaaaggagacccuggcccuccaggccccauggguccgccuggagaaacaccauguccuccugggaauaaugggcugccuggagccccuggugucccuggagagcguggagagaagggggaggcuggcgagagaggcccuccagggcuuccagcucaucuagaugaggagcuccaagccacacuccacgacuucagacaucaaauccugcagacaaggggagcccucagucugcagggcuccauaaugacaguaggagagaaggucuucuccagcaaugggcaguccaucacuuuugaugccauucaggaggcaugugccagagcaggcggccgcauugcugucccaaggaauccagaggaaaaugaggccauugcaagcuucgugaagaaguacaacacauaugccuauguaggccugacugagggucccagcccuggagacuuccgcuacucagaugggaccccuguaaacuacaccaacugguaccgaggggagccugcaggucggggaaaagagcaguguguggagauguacacagaugggcaguggaaugacaggaacugccuguacucccgacugaccaucugugaguucuga

SEQ ID NO: 9370 - RNA, 747 nt, Artificial Sequence
  derived and/or modified sequence opt1 from Surfactant_protein_A__Homo_sapiens__AAI57867
auguggcugugcccccucgcccugaaccugauccucauggccgcgagcggcgccgccugcgaggugaaggacgucugcgugggguccccgggcauccccgggacccccggcagccacgggcugcccggccgcgacggccgggacggggugaagggcgacccggggccgcccggccccauggggccgcccggcgagacccccugcccgcccggcaacaacgggcugcccggcgcccccgggguccccggcgagcgcggcgagaagggggaggccggcgagcgggggccgcccggccuccccgcgcaccuggacgaggagcugcaggccacgcuccacgacuuccgccaccagauccugcagacccgcggggcccugucccuccagggcagcaucaugaccgugggcgagaagguguucuccagcaacgggcaguccaucaccuucgacgccauccaggaggcgugcgcccgggccggcgggcggaucgccgucccccgcaaccccgaggagaacgaggccaucgcgagcuucgugaagaaguacaacacguacgccuacgugggccugaccgaggggcccucccccggcgacuuccgguacagcgacggcacccccgucaacuacaccaacugguaccgcggggagccggccggccgggggaaggagcagugcguggagauguacacggacggccaguggaacgaccgcaacugccuguacucccggcucaccaucugcgaguucuga

SEQ ID NO: 9371 - RNA, 747 nt, Artificial Sequence
  derived and/or modified sequence opt2 from Surfactant_protein_A__Homo_sapiens__AAI57867
auguggcucugcccccucgcccucaaccucauccucauggccgccuccggcgccgccugcgaggucaaggacgucugcgucggcucccccggcauccccggcacccccggcucccacggccuccccggccgcgacggccgcgacggcgucaagggcgaccccggcccccccggccccaugggcccccccggcgagacccccugcccccccggcaacaacggccuccccggcgcccccggcguccccggcgagcgcggcgagaagggcgaggccggcgagcgcggcccccccggccuccccgcccaccucgacgaggagcuccaggccacccuccacgacuuccgccaccagauccuccagacccgcggcgcccucucccuccagggcuccaucaugaccgucggcgagaaggucuucuccuccaacggccaguccaucaccuucgacgccauccaggaggccugcgcccgcgccggcggccgcaucgccgucccccgcaaccccgaggagaacgaggccaucgccuccuucgucaagaaguacaacaccuacgccuacgucggccucaccgagggccccucccccggcgacuuccgcuacuccgacggcacccccgucaacuacaccaacugguaccgcggcgagcccgccggccgcggcaaggagcagugcgucgagauguacaccgacggccaguggaacgaccgcaacugccucuacucccgccucaccaucugcgaguucuga

SEQ ID NO: 9372 - RNA, 747 nt, Artificial Sequence
  derived and/or modified sequence opt3 from Surfactant_protein_A__Homo_sapiens__AAI57867
auguggcugugcccccucgcccuuaaccugaucuugauggcugcaagcggcgccgcgugugaggugaaggacgucugcguuggguccccugguauuccaggaaccccgggcucucacggguuacccggaagagauggcagggacggugugaaaggggauccuggaccacccggcccuaugggcccacccggggaaacaccuuguccaccgggaaauaacggucugcccggcgcuccugggguaccaggagagcggggcgaaaagggugaggccggggaacgcggacccccuggccuaccagcacaucucgacgaggagcugcaggccacucuucacgauuuccgacaucaaauacugcagacgcguggcgcuuugucacuccaggggaguaucaugaccgugggagaaaaagucuuuagcuccaauggucagucuauuacauucgacgcaauccaagaggccugcgcuagagccggcgggaggauugcggugccccggaacccggaagagaaugaggcaaucgccucguuuguuaagaaauacaacacuuaugcuuacgugggacugaccgaaggcccuucacccggugauuuccgcuauagcgacgggacaccagucaauuacaccaacugguauagaggcgagccugccggaaggggcaaggaacaguguguggagauguacacugaugggcaguggaaugaccggaacugccuguauagucgccucacaauaugugaauuuuga

SEQ ID NO: 9373 - RNA, 747 nt, Artificial Sequence
  derived and/or modified sequence opt4 from Surfactant_protein_A__Homo_sapiens__AAI57867
auguggcugugcccccuggcccugaaccugauccugauggccgccagcggcgccgccugcgaggugaaggacgugugcgugggcagccccggcauccccggcacccccggcagccacggccugcccggcagagacggcagagacggcgugaagggcgaccccggcccccccggccccaugggcccccccggcgagacccccugcccccccggcaacaacggccugcccggcgcccccggcgugcccggcgagagaggcgagaagggcgaggccggcgagagaggcccccccggccugcccgcccaccuggacgaggagcugcaggccacccugcacgacuucagacaccagauccugcagaccagaggcgcccugagccugcagggcagcaucaugaccgugggcgagaagguguucagcagcaacggccagagcaucaccuucgacgccauccaggaggccugcgccagagccggcggcagaaucgccgugcccagaaaccccgaggagaacgaggccaucgccagcuucgugaagaaguacaacaccuacgccuacgugggccugaccgagggccccagccccggcgacuucagauacagcgacggcacccccgugaacuacaccaacugguacagaggcgagcccgccggcagaggcaaggagcagugcguggagauguacaccgacggccaguggaacgacagaaacugccuguacagcagacugaccaucugcgaguucuga

SEQ ID NO: 9374 - RNA, 747 nt, Artificial Sequence
  derived and/or modified sequence opt5 from Surfactant_protein_A__Homo_sapiens__AAI57867
auguggcugugcccccucgcccugaaccuuauccugauggcugccagcggcgcggcuugugaggugaaggacgucugcguuggguccccugggauuccgggcacccccgggucucacggacucccuggcagagaugggcgggacggagugaaaggcgaucccggcccucccgggccuaugggaccgcccggcgaaacaccuugucccccugggaauaacggacugcccggcgccccgggggugccuggagagcgcggcgaaaagggcgaggccggggaaagaggacccccuggccuucccgcucaucuggacgaggagcuccaggccacgcugcacgauuuccggcaucaaauccugcagacccgcggggcucucagccugcagggauccauuaugacagucggcgaaaaaguguuuucuagcaaugggcaguccaucaccuucgacgccauucaagaggcgugcgccagagcuggaggccggaucgccguuccccgcaacccugaagagaaugaggcuaucgccucuuuugugaagaaauacaacacauaugcguacgucggccuuaccgaagggccgagccccggagauuucagauauuccgacggcacaccugugaauuacaccaacugguaucggggagagcccgccggacgcggcaaggaacaguguguugagauguacacggaugggcaguggaaugacagaaacugccuguauagccggcucaccauuugugaauuuuga

SEQ ID NO: 9375 - protein, 248 aa, Artificial Sequence
  Surfactant_protein_A__Homo_sapiens__Q8IWL2
MWLCPLALNLILMAASGAVCEVKDVCVGSPGIPGTPGSHGLPGRDGRDGLKGDPGPPGPMGPPGEMPCPPGNDGLPGAPGIPGECGEKGEPGERGPPGLPAHLDEELQATLHDFRHQILQTRGALSLQGSIMTVGEKVFSSNGQSITFDAIQEACARAGGRIAVPRNPEENEAIASFVKKYNTYAYVGLTEGPSPGDFRYSDGTPVNYTNWYRGEPAGRGKEQCVEMYTDGQWNDRNCLYSRLTICEF

SEQ ID NO: 9376 - RNA, 747 nt, Artificial Sequence
  Surfactant_protein_A__Homo_sapiens__AAI11571
auguggcugugcccucuggcccucaaccucaucuugauggcagccucuggugcugugugcgaagugaaggacguuuguguuggaagcccugguauccccggcacuccuggaucccacggccugccaggcagggacgggagagauggucucaaaggagacccuggcccuccaggccccauggguccaccuggagaaaugccauguccuccuggaaaugaugggcugccuggagccccugguaucccuggagaguguggagagaagggggagccuggcgagaggggcccuccagggcuuccagcucaucuagaugaggagcuccaagccacacuccacgacuuuagacaucaaauccugcagacaaggggagcccucagucugcagggcuccauaaugacaguaggagagaaggucuucuccagcaaugggcaguccaucacuuuugaugccauucaggaggcaugugccagagcaggcggccgcauugcugucccaaggaauccagaggaaaaugaggccauugcaagcuucgugaagaaguacaacacauaugccuauguaggccugacugagggucccagcccuggagacuuccgcuacucagacgggaccccuguaaacuacaccaacugguaccgaggggagcccgcaggucggggaaaagagcaguguguggagauguacacagaugggcaguggaaugacaggaacugccuguacucccgacugaccaucugugaguucuga

SEQ ID NO: 9377 - RNA, 747 nt, Artificial Sequence
  derived and/or modified sequence opt1 from Surfactant_protein_A__Homo_sapiens__AAI11571
auguggcugugcccccucgcccugaaccugauccucauggccgcgagcggcgccgugugcgaggucaaggacgugugcgugggguccccgggcauccccgggacccccggcagccacgggcugcccggccgcgacggccgggacgggcugaagggcgacccggggccgcccggccccauggggccgcccggcgagaugcccugcccgcccggcaacgacgggcuccccggcgcccccgggauccccggcgagugcggcgagaagggggagcccggcgagcgcgggccgcccggccugcccgcccaccuggacgaggagcuccaggccacccugcacgacuuccggcaccagauccugcagacgcgcggggcgcucucccugcagggcagcaucaugaccgucggcgagaagguguucuccagcaacgggcaguccaucaccuucgacgccauccaggaggccugcgcccgggcgggcgggcgcaucgccgugccccggaaccccgaggagaacgaggccaucgccagcuucgucaagaaguacaacaccuacgccuacgugggccugacggaggggcccucccccggcgacuuccgcuacagcgacggcaccccggugaacuacaccaacugguaccgcggggagcccgcgggccgggggaaggagcagugcgucgagauguacaccgacggccaguggaacgaccggaacugccucuacucccgccugacgaucugcgaguucuga

SEQ ID NO: 9378 - RNA, 747 nt, Artificial Sequence
  derived and/or modified sequence opt2 from Surfactant_protein_A__Homo_sapiens__AAI11571
auguggcucugcccccucgcccucaaccucauccucauggccgccuccggcgccgucugcgaggucaaggacgucugcgucggcucccccggcauccccggcacccccggcucccacggccuccccggccgcgacggccgcgacggccucaagggcgaccccggcccccccggccccaugggcccccccggcgagaugcccugcccccccggcaacgacggccuccccggcgcccccggcauccccggcgagugcggcgagaagggcgagcccggcgagcgcggcccccccggccuccccgcccaccucgacgaggagcuccaggccacccuccacgacuuccgccaccagauccuccagacccgcggcgcccucucccuccagggcuccaucaugaccgucggcgagaaggucuucuccuccaacggccaguccaucaccuucgacgccauccaggaggccugcgcccgcgccggcggccgcaucgccgucccccgcaaccccgaggagaacgaggccaucgccuccuucgucaagaaguacaacaccuacgccuacgucggccucaccgagggccccucccccggcgacuuccgcuacuccgacggcacccccgucaacuacaccaacugguaccgcggcgagcccgccggccgcggcaaggagcagugcgucgagauguacaccgacggccaguggaacgaccgcaacugccucuacucccgccucaccaucugcgaguucuga

SEQ ID NO: 9379 - RNA, 747 nt, Artificial Sequence
  derived and/or modified sequence opt3 from Surfactant_protein_A__Homo_sapiens__AAI11571
auguggcugugcccccucgcccuuaaccugaucuugauggcugcaagcggcgccgugugugaggucaaggacguuugcgugggguccccugguauuccaggaaccccgggcucucacggguuacccggaagagauggcagggacggucugaaaggggauccuggaccacccggcccuaugggcccacccggggaaaugccuuguccaccgggaaaugacggucuacccggcgcgccugggauaccaggagagugcggcgaaaagggugagcccggggaacggggaccuccaggccuccccgcucaucuggaugaggagcuucaggccacacugcacgacuuccgccaucaaaucuugcagacucgaggcgcacucucacugcaggggaguauuaugacgguaggagaaaaaguguuuagcuccaacggucagucuaucaccuucgaugccauucaagaggcuugugcacgugccggcgggagaaucgcugucccgaggaauccugaagagaacgaggccauagcgucguuugugaagaaauacaauacauaugcauacguuggacugacugaaggccccucaccaggugacuuccgguauagcgaugggaccccugugaacuacacaaauugguaucgcggcgagcccgccggaagaggcaaggaacagugcgucgagauguacaccgacgggcaguggaacgauaggaauugucucuauagucgguuaacuaucugcgaauuuuga

SEQ ID NO: 9380 - RNA, 747 nt, Artificial Sequence
  derived and/or modified sequence opt4 from Surfactant_protein_A__Homo_sapiens__AAI11571
auguggcugugcccccuggcccugaaccugauccugauggccgccagcggcgccgugugcgaggugaaggacgugugcgugggcagccccggcauccccggcacccccggcagccacggccugcccggcagagacggcagagacggccugaagggcgaccccggcccccccggccccaugggcccccccggcgagaugcccugcccccccggcaacgacggccugcccggcgcccccggcauccccggcgagugcggcgagaagggcgagcccggcgagagaggcccccccggccugcccgcccaccuggacgaggagcugcaggccacccugcacgacuucagacaccagauccugcagaccagaggcgcccugagccugcagggcagcaucaugaccgugggcgagaagguguucagcagcaacggccagagcaucaccuucgacgccauccaggaggccugcgccagagccggcggcagaaucgccgugcccagaaaccccgaggagaacgaggccaucgccagcuucgugaagaaguacaacaccuacgccuacgugggccugaccgagggccccagccccggcgacuucagauacagcgacggcacccccgugaacuacaccaacugguacagaggcgagcccgccggcagaggcaaggagcagugcguggagauguacaccgacggccaguggaacgacagaaacugccuguacagcagacugaccaucugcgaguucuga

SEQ ID NO: 9381 - RNA, 747 nt, Artificial Sequence
  derived and/or modified sequence opt5 from Surfactant_protein_A__Homo_sapiens__AAI11571
auguggcugugcccccucgcccugaaccuuauccugauggcugccagcggcgcggugugugaggucaaggacguuugcgugggguccccugggauuccgggcacccccgggucucacggacucccuggcagagaugggcgggacggacugaaaggcgaucccggcccucccgggccuaugggaccgcccggcgaaaugccuugucccccugggaaugacggacuucccggcgcuccggggaucccuggagagugcggcgaaaagggcgagcccggggaacgcggaccucccggccugcccgcccaucucgaugaggagcugcaggccacacugcacgacuucagacaucaaauucuccagacgcggggagcucugagccuucagggauccaucaugaccgugggcgaaaaagucuuuucuagcaacgggcaguccauuacauucgaugccauccaagaggcuugugcccgcgcgggaggcagaaucgccgugccucggaauccggaagagaacgaggcuauugccucuuuuguuaagaaauacaauaccuaugcuuacgugggccugacagaagggcccagcccuggagacuuccgcuauuccgauggcacccccgucaacuacacaaauugguauagaggggagccugccggacggggcaaggaacagugcguggagauguacaccgacgggcaguggaacgaucgcaauugucucuauagcagacugacgaucugcgaauuuuga

SEQ ID NO: 9382 - protein, 375 aa, Artificial Sequence
  Surfactant_protein_D__Homo_sapiens__P35247
MLLFLLSALVLLTQPLGYLEAEMKTYSHRTMPSACTLVMCSSVESGLPGRDGRDGREGPRGEKGDPGLPGAAGQAGMPGQAGPVGPKGDNGSVGEPGPKGDTGPSGPPGPPGVPGPAGREGPLGKQGNIGPQGKPGPKGEAGPKGEVGAPGMQGSAGARGLAGPKGERGVPGERGVPGNTGAAGSAGAMGPQGSPGARGPPGLKGDKGIPGDKGAKGESGLPDVASLRQQVEALQGQVQHLQAAFSQYKKVELFPNGQSVGEKIFKTAGFVKPFTEAQLLCTQAGGQLASPRSAAENAALQQLVVAKNEAAFLSMTDSKTEGKFTYPTGESLVYSNWAPGEPNDDGGSEDCVEIFTNGKWNDRACGEKRLVVCEF

SEQ ID NO: 9383 - RNA, 1128 nt, Artificial Sequence
  Surfactant_protein_D__Homo_sapiens__CCDS7362.1
augcugcucuuccuccucucugcacugguccugcucacacagccccugggcuaccuggaagcagaaaugaagaccuacucccacagaacaaugcccagugcuugcacccuggucauguguagcucaguggagaguggccugccuggucgcgauggacgggaugggagagagggcccucggggcgagaagggggacccagguuugccaggagcugcagggcaagcagggaugccuggacaagcuggcccaguugggcccaaaggggacaauggcucuguuggagaaccuggaccaaagggagacacugggccaaguggaccuccaggaccucccggugugccugguccagcuggaagagaagguccccuggggaagcaggggaacauaggaccucagggcaagccaggcccaaaaggagaagcugggcccaaaggagaaguaggugccccaggcaugcagggcucggcaggggcaagaggccucgcaggcccuaagggagagcgaggugucccuggugagcguggagucccuggaaacacaggggcagcagggucugcuggagccauggguccccagggaaguccaggugccaggggacccccgggauugaagggggacaaaggcauuccuggagacaaaggagcaaagggagaaagugggcuuccagauguugcuucucugaggcagcagguugaggccuuacagggacaaguacagcaccuccaggcugcuuucucucaguauaagaaaguugagcucuucccaaauggccaaagugucggggagaagauuuucaagacagcaggcuuuguaaaaccauuuacggaggcacagcugcugugcacacaggcugguggacaguuggccucuccacgcucugccgcugagaaugccgccuugcaacagcuggucguagcuaagaacgaggcugcuuuccugagcaugacugauuccaagacagagggcaaguucaccuaccccacaggagagucccuggucuauuccaacugggccccaggggagcccaacgaugauggcgggucagaggacuguguggagaucuucaccaauggcaaguggaaugacagggcuuguggagaaaagcgucuuguggucugcgaguucuga

SEQ ID NO: 9384 - RNA, 1128 nt, Artificial Sequence
  derived and/or modified sequence opt1 from Surfactant_protein_D__Homo_sapiens__CCDS7362.1
augcuccucuuccugcugagcgcccucgugcugcugacccagccccucggcuaccuggaggccgagaugaagaccuacucccaccgcacgaugccgagcgcgugcacccuggucaugugcuccagcguggaguccgggcuccccggccgggacgggcgcgacggccgggaggggccccgcggcgagaagggcgaccccgggcugccgggcgccgccgggcaggccggcaugcccgggcaggccggccccgugggccccaagggggacaacggcagcgucggggagccgggccccaagggcgacaccgggcccuccgggcccccggggccgcccggcgugcccgggcccgcgggccgggagggcccccuggggaagcagggcaacaucgggccccagggcaagcccgggccgaagggcgaggccggccccaagggggaggugggcgcccccgggaugcagggcagcgccggggcgcgcggccucgccggccccaagggggagcggggcgucccgggggagcgcggcgugcccggcaacaccggggccgccggcuccgccggggcgaugggcccccaggggagccccggcgcccggggcccgcccgggcugaagggcgacaaggggauccccggcgacaagggggccaagggcgaguccggccugccggacguggccagccuccgccagcaggucgaggcccugcagggccaggugcagcaccuccaggcggccuucucccaguacaagaagguggagcuguuccccaacggccagagcgucggggagaagaucuucaagacggccggcuucgugaagcccuucaccgaggcccagcugcugugcacccaggccgggggccagcuggcgagcccccgguccgccgccgagaacgccgcccugcagcagcugguggucgcgaagaacgaggccgccuuccucuccaugaccgacagcaagacggagggcaaguucaccuacccgaccggggagucccugguguacagcaacugggcccccggcgagcccaacgacgacgggggcagcgaggacugcguggagaucuucaccaacgggaaguggaacgaccgcgcgugcggcgagaagcggcuggucgugugcgaguucuga

SEQ ID NO: 9385 - RNA, 1128 nt, Artificial Sequence
  derived and/or modified sequence opt2 from Surfactant_protein_D__Homo_sapiens__CCDS7362.1
augcuccucuuccuccucuccgcccucguccuccucacccagccccucggcuaccucgaggccgagaugaagaccuacucccaccgcaccaugcccuccgccugcacccucgucaugugcuccuccgucgaguccggccuccccggccgcgacggccgcgacggccgcgagggcccccgcggcgagaagggcgaccccggccuccccggcgccgccggccaggccggcaugcccggccaggccggccccgucggccccaagggcgacaacggcuccgucggcgagcccggccccaagggcgacaccggccccuccggcccccccggcccccccggcguccccggccccgccggccgcgagggcccccucggcaagcagggcaacaucggcccccagggcaagcccggccccaagggcgaggccggccccaagggcgaggucggcgcccccggcaugcagggcuccgccggcgcccgcggccucgccggccccaagggcgagcgcggcguccccggcgagcgcggcguccccggcaacaccggcgccgccggcuccgccggcgccaugggcccccagggcucccccggcgcccgcggcccccccggccucaagggcgacaagggcauccccggcgacaagggcgccaagggcgaguccggccuccccgacgucgccucccuccgccagcaggucgaggcccuccagggccagguccagcaccuccaggccgccuucucccaguacaagaaggucgagcucuuccccaacggccaguccgucggcgagaagaucuucaagaccgccggcuucgucaagcccuucaccgaggcccagcuccucugcacccaggccggcggccagcucgccuccccccgcuccgccgccgagaacgccgcccuccagcagcucgucgucgccaagaacgaggccgccuuccucuccaugaccgacuccaagaccgagggcaaguucaccuaccccaccggcgagucccucgucuacuccaacugggcccccggcgagcccaacgacgacggcggcuccgaggacugcgucgagaucuucaccaacggcaaguggaacgaccgcgccugcggcgagaagcgccucgucgucugcgaguucuga

SEQ ID NO: 9386 - RNA, 1128 nt, Artificial Sequence
  derived and/or modified sequence opt3 from Surfactant_protein_D__Homo_sapiens__CCDS7362.1
augcuccuguuccuucugagcgccuugguguuacugacccagccccuaggcuaccucgaggcugaaaugaagacauauucccacagaacuaugccuucugcaugcacgcuggucauguguucaaguguugagagcgggcuuccaggaagggacggucgggauggccgcgaagggccgcgaggagagaaaggcgaccccggucugccuggggccgcgggacaagcuggcaugccaggccaggccgggcccgugggaccuaagggugauaacggcuccguaggggaaccaggacccaaaggcgacaccgguccuucugggccaccgggacccccuggcgugccaggccccgcagggcgugagggaccuuuggguaagcagggcaauaucgggccacagggaaaacccggcccgaagggugaggccgggccuaagggcgaagucggagcucccggcaugcaagggucggcaggagccagaggucucgcuggcccaaaaggggagaggggagugccuggcgaacgggguguucccgggaacacaggcgccgcgggaucagcaggcgccauggggccacagggaagccccggugcucgcggcccuccagggcugaagggagauaaaggcauuccgggugacaagggggccaaaggcgagaguggacugcccgauguggcaucccucagacagcaggucgaggcuuuacaaggccaggugcagcaucugcaggccgcguuuucucaauacaagaagguagaacuuuucccuaaugggcagagcguuggagagaaaauauuuaagacugccggcuucgugaaaccauuuaccgaagcacaguugcugugcacacaagcuggugggcagcuagccucccccaggucagcugccgagaacgcagcccuccagcagcuggucguggcuaagaaugaagcggcauuccuuaguaugaccgacagcaaaacugagggaaaguuuacauauccuaccggcgagucucugguguacuccaacugggccccaggugaacccaaugaugacggcgggucagaggauugugucgaaaucuucacgaacggaaaauggaaugaccgggcuugcggcgagaagcgcuugguugugugugaauuuuga

SEQ ID NO: 9387 - RNA, 1128 nt, Artificial Sequence
  derived and/or modified sequence opt4 from Surfactant_protein_D__Homo_sapiens__CCDS7362.1
augcugcuguuccugcugagcgcccuggugcugcugacccagccccugggcuaccuggaggccgagaugaagaccuacagccacagaaccaugcccagcgccugcacccuggugaugugcagcagcguggagagcggccugcccggcagagacggcagagacggcagagagggccccagaggcgagaagggcgaccccggccugcccggcgccgccggccaggccggcaugcccggccaggccggccccgugggccccaagggcgacaacggcagcgugggcgagcccggccccaagggcgacaccggccccagcggcccccccggcccccccggcgugcccggccccgccggcagagagggcccccugggcaagcagggcaacaucggcccccagggcaagcccggccccaagggcgaggccggccccaagggcgaggugggcgcccccggcaugcagggcagcgccggcgccagaggccuggccggccccaagggcgagagaggcgugcccggcgagagaggcgugcccggcaacaccggcgccgccggcagcgccggcgccaugggcccccagggcagccccggcgccagaggcccccccggccugaagggcgacaagggcauccccggcgacaagggcgccaagggcgagagcggccugcccgacguggccagccugagacagcagguggaggcccugcagggccaggugcagcaccugcaggccgccuucagccaguacaagaagguggagcuguuccccaacggccagagcgugggcgagaagaucuucaagaccgccggcuucgugaagcccuucaccgaggcccagcugcugugcacccaggccggcggccagcuggccagccccagaagcgccgccgagaacgccgcccugcagcagcuggugguggccaagaacgaggccgccuuccugagcaugaccgacagcaagaccgagggcaaguucaccuaccccaccggcgagagccugguguacagcaacugggcccccggcgagcccaacgacgacggcggcagcgaggacugcguggagaucuucaccaacggcaaguggaacgacagagccugcggcgagaagagacugguggugugcgaguucuga

SEQ ID NO: 9388 - RNA, 1128 nt, Artificial Sequence
  derived and/or modified sequence opt5 from Surfactant_protein_D__Homo_sapiens__CCDS7362.1
augcuccuguuccugcuuagcgcccuggugcuccugacccagccccuuggcuaccuggaggcugaaaugaagacauauucccacagaacgaugccuucugccugcacccucgucauguguagcuccguugagucugggcugccgggacgggacggccgcgaugggagagaaggaccccggggcgagaaaggggacccuggacugcccggcgcggcuggccaagccgggaugccuggacaggccggccccguggggccuaagggagauaacggcagcgugggggaaccgggacccaaaggcgacacaggcccuuccgggcccccuggacccccgggcgucccugggcccgcuggacgcgagggcccucucgggaagcagggaaauaucggcccccagggcaaacccgggccuaagggagaggccggcccgaagggggaagugggagcucccggcaugcaagggucugccggcgcgagaggacuggccggcccuaaaggggagcggggaguucccggcgaacgcggggugccuggaaacaccggcgcugccgggagcgcuggcgccaugggaccccagggcuccccgggggcgagaggaccucccggccuuaagggggauaaagggauuccuggcgacaagggggccaaaggcgagagcggacugcccgaugucgcuucucuccggcaacagguggaggcccugcagggccagguucagcaucuucaggcugccuuuucccaauacaagaagguggaacuguucccuaaugggcagagcgucggagagaaaaucuuuaagacagccggcuucgugaaacccuuuaccgaagcucagcuccugugcacacaagcgggaggacagcuggccucuccgcgcuccgcugccgagaacgccgcucuccagcagcugguggucgccaagaaugaagcggcuuuccuuagcaugaccgacucuaaaacggagggcaaguuuaccuauccuacaggggagucccugguuuacagcaacugggcccccggcgaacccaaugaugacggaggcuccgaggauuguguggaaauuuucaccaacgggaaauggaaugacagagccugcggagagaagcggcucguggucugugaauuuuga

SEQ ID NO: 9389 - protein, 606 aa, Artificial Sequence
  TAK1__Homo_sapiens__O43318
MSTASAASSSSSSSAGEMIEAPSQVLNFEEIDYKEIEVEEVVGRGAFGVVCKAKWRAKDVAIKQIESESERKAFIVELRQLSRVNHPNIVKLYGACLNPVCLVMEYAEGGSLYNVLHGAEPLPYYTAAHAMSWCLQCSQGVAYLHSMQPKALIHRDLKPPNLLLVAGGTVLKICDFGTACDIQTHMTNNKGSAAWMAPEVFEGSNYSEKCDVFSWGIILWEVITRRKPFDEIGGPAFRIMWAVHNGTRPPLIKNLPKPIESLMTRCWSKDPSQRPSMEEIVKIMTHLMRYFPGADEPLQYPCQYSDEGQSNSATSTGSFMDIASTNTSNKSDTNMEQVPATNDTIKRLESKLLKNQAKQQSESGRLSLGASRGSSVESLPPTSEGKRMSADMSEIEARIAATTAYSKPKRGHRKTASFGNILDVPEIVISGNGQPRRRSIQDLTVTGTEPGQVSSRSSSPSVRMITTSGPTSEKPTRSHPWTPDDSTDTNGSDNSIPMAYLTLDHQLQPLAPCPNSKESMAVFEQHCKMAQEYMKVQTEIALLLQRKQELVAELDQDEKDQQNTSRLVQEHKKLLDENKSLSTYYQQCKKQLEVIRSQQQKRQGTS

SEQ ID NO: 9390 - RNA, 1821 nt, Artificial Sequence
  TAK1__Homo_sapiens__ABC40734
augucuacagccucugccgccuccuccuccuccucgucuucggccggugagaugaucgaagccccuucccagguccucaacuuugaagagaucgacuacaaggagaucgagguggaagagguuguuggaagaggagccuuuggaguuguuugcaaagcuaaguggagagcaaaagauguugcuauuaaacaaauagaaagugaaucugagaggaaagcguuuauuguagagcuucggcaguuaucccgugugaaccauccuaauauuguaaagcuuuauggagccugcuugaauccagugugucuugugauggaauaugcugaagggggcucuuuauauaaugugcugcauggugcugaaccauugccauauuauacugcugcccacgcaaugaguugguguuuacaguguucccaaggaguggcuuaucuucacagcaugcaacccaaagcgcuaauucacagggaccugaaaccaccaaacuuacugcugguugcaggggggacaguucuaaaaauuugugauuuugguacagccugugacauucagacacacaugaccaauaacaaggggagugcugcuuggauggcaccugaaguuuuugaagguaguaauuacagugaaaaaugugacgucuucagcugggguauuauucuuugggaagugauaacgcgucggaaacccuuugaugagauugguggcccagcuuuccgaaucaugugggcuguucauaaugguacucgaccaccacugauaaaaaauuuaccuaagcccauugagagccugaugacucguuguuggucuaaagauccuucccagcgcccuucaauggaggaaauugugaaaauaaugacucacuugaugcgguacuuuccaggagcagaugagccauuacaguauccuugucaguauucagaugaaggacagagcaacucugccaccaguacaggcucauucauggacauugcuucuacaaauacgaguaacaaaagugacacuaauauggagcaaguuccugccacaaaugauacuauuaagcgcuuagaaucaaaauuguugaaaaaucaggcaaagcaacagagugaaucuggacguuuaagcuugggagccucccgugggagcaguguggagagcuugcccccaaccucugagggcaagaggaugagugcugacaugucugaaauagaagcuaggaucgccgcaaccacagccuauuccaagccuaaacggggccaccguaaaacugcuucauuuggcaacauucuggaugucccugagaucgucauaucaggcaacggacagccaagacguagauccauccaagacuugacuguaacuggaacagaaccuggucaggugagcaguaggucauccagucccagugucagaaugauuacuaccucaggaccaaccucagaaaagccaacucgaagucauccauggaccccugaugauuccacagauaccaauggaucagauaacuccaucccaauggcuuaucuuacacuggaucaccaacuacagccucuagcaccgugcccaaacuccaaagaaucuauggcaguguuugaacagcauuguaaaauggcacaagaauauaugaaaguucaaacagaaauugcauuguuauuacagagaaagcaagaacuaguugcagaacuggaccaggaugaaaaggaccagcaaaauacaucucgccugguacaggaacauaaaaagcuuuuagaugaaaacaaaagccuuucuacuuacuaccagcaaugcaaaaaacaacuagaggucaucagaagucagcagcagaaacgacaaggcacuucauga

SEQ ID NO: 9391 - RNA, 1821 nt, Artificial Sequence
  derived and/or modified sequence opt1 from TAK1__Homo_sapiens__ABC40734
augagcaccgccuccgccgcgagcuccagcuccagcuccagcgccggcgagaugaucgaggcccccucccaggugcugaacuucgaggagaucgacuacaaggagaucgaggucgaggaggugguggggcgcggcgccuucggggucgugugcaaggccaaguggcgggcgaaggacguggccaucaagcagaucgagagcgaguccgagcgcaaggccuucaucgucgagcuccggcagcugagccgcgugaaccacccgaacaucgugaagcuguacggcgccugccucaaccccgucugccuggugauggaguacgcggagggcgggucccuguacaacgugcuccacggcgccgagccccugcccuacuacaccgccgcccacgccaugagcuggugccugcagugcucccagggggucgcguaccuccacagcaugcagccgaaggcccugauccaccgggaccugaagccgcccaaccuccugcugguggccggcgggacggugcucaagaucugcgacuucggcaccgccugcgacauccagacccacaugaccaacaacaagggguccgccgcguggauggcccccgaggucuucgagggcagcaacuacuccgagaagugcgacguguucagcuggggcaucauccugugggaggugaucacgcgccggaagcccuucgacgagaucgggggccccgccuuccgcaucaugugggccguccacaacgggacccggccgccccugaucaagaaccuccccaagcccaucgagagccugaugacccgcugcugguccaaggaccccagccagcggcccuccauggaggagaucgugaagaucaugacccaccugaugcgcuacuucccgggcgccgacgagccccuccaguaccccugccaguacagcgacgagggccaguccaacagcgcgacguccaccgggagcuucauggacaucgccuccaccaacaccagcaacaaguccgacacgaacauggagcagguccccgccaccaacgacaccaucaagcggcuggagagcaagcugcucaagaaccaggccaagcagcaguccgagagcggccgccugucccugggggccagccggggcuccagcguggagucccucccgcccaccagcgaggggaagcgcaugagcgcggacauguccgagaucgaggcccggaucgccgccacgaccgcguacagcaagcccaagcgcggccaccggaagaccgccuccuucggcaacauccuggacgugcccgagaucgugaucagcgggaacggccagccgcgccggcgcuccauccaggaccugaccgucacggggaccgagcccggccaggugagcucccgcagcuccagccccuccguccggaugaucaccaccagcgggcccacguccgagaagccgacccgcagccaccccuggacccccgacgacuccaccgacacgaacggcagcgacaacuccaucccgauggccuaccucacccuggaccaccagcugcagccccucgcccccugccccaacagcaaggagagcauggccguguucgagcagcacugcaagauggcgcaggaguacaugaaggugcagaccgagaucgcccugcugcuccagcggaagcaggagcuggucgccgagcuggaccaggacgagaaggaccagcagaacaccucccgccucgugcaggagcacaagaagcugcuggacgagaacaagagccucuccacguacuaccagcagugcaagaagcagcuggaggugauccggagccagcagcagaagcgccagggcaccuccuga

SEQ ID NO: 9392 - RNA, 1821 nt, Artificial Sequence
  derived and/or modified sequence opt2 from TAK1__Homo_sapiens__ABC40734
auguccaccgccuccgccgccuccuccuccuccuccuccuccgccggcgagaugaucgaggcccccucccagguccucaacuucgaggagaucgacuacaaggagaucgaggucgaggaggucgucggccgcggcgccuucggcgucgucugcaaggccaaguggcgcgccaaggacgucgccaucaagcagaucgaguccgaguccgagcgcaaggccuucaucgucgagcuccgccagcucucccgcgucaaccaccccaacaucgucaagcucuacggcgccugccucaaccccgucugccucgucauggaguacgccgagggcggcucccucuacaacguccuccacggcgccgagccccuccccuacuacaccgccgcccacgccauguccuggugccuccagugcucccagggcgucgccuaccuccacuccaugcagcccaaggcccucauccaccgcgaccucaagccccccaaccuccuccucgucgccggcggcaccguccucaagaucugcgacuucggcaccgccugcgacauccagacccacaugaccaacaacaagggcuccgccgccuggauggcccccgaggucuucgagggcuccaacuacuccgagaagugcgacgucuucuccuggggcaucauccucugggaggucaucacccgccgcaagcccuucgacgagaucggcggccccgccuuccgcaucaugugggccguccacaacggcacccgccccccccucaucaagaaccuccccaagcccaucgagucccucaugacccgcugcugguccaaggaccccucccagcgccccuccauggaggagaucgucaagaucaugacccaccucaugcgcuacuuccccggcgccgacgagccccuccaguaccccugccaguacuccgacgagggccaguccaacuccgccaccuccaccggcuccuucauggacaucgccuccaccaacaccuccaacaaguccgacaccaacauggagcagguccccgccaccaacgacaccaucaagcgccucgaguccaagcuccucaagaaccaggccaagcagcaguccgaguccggccgccucucccucggcgccucccgcggcuccuccgucgagucccucccccccaccuccgagggcaagcgcauguccgccgacauguccgagaucgaggcccgcaucgccgccaccaccgccuacuccaagcccaagcgcggccaccgcaagaccgccuccuucggcaacauccucgacguccccgagaucgucaucuccggcaacggccagccccgccgccgcuccauccaggaccucaccgucaccggcaccgagcccggccaggucuccucccgcuccuccucccccuccguccgcaugaucaccaccuccggccccaccuccgagaagcccacccgcucccaccccuggacccccgacgacuccaccgacaccaacggcuccgacaacuccauccccauggccuaccucacccucgaccaccagcuccagccccucgcccccugccccaacuccaaggaguccauggccgucuucgagcagcacugcaagauggcccaggaguacaugaagguccagaccgagaucgcccuccuccuccagcgcaagcaggagcucgucgccgagcucgaccaggacgagaaggaccagcagaacaccucccgccucguccaggagcacaagaagcuccucgacgagaacaagucccucuccaccuacuaccagcagugcaagaagcagcucgaggucauccgcucccagcagcagaagcgccagggcaccuccuga

SEQ ID NO: 9393 - RNA, 1821 nt, Artificial Sequence
  derived and/or modified sequence opt3 from TAK1__Homo_sapiens__ABC40734
augagcaccgccuccgcugcaucuucaaguagcuccucuucggccggcgagaugaucgaagcgcccucacaggugcugaacuucgaggaaauugacuacaaggagauagaagucgaggagguuguggggagaggagcuuuugguguagugugcaaagccaaguggagggcaaaagaugucgccaucaagcaaauugaaagcgagagugaacggaaggcuuucaucguggagcuccgccagcuuucccgaguuaaucacccuaacauugugaaacuguauggcgcauguuugaauccagucugcuuagugauggaguacgccgaagggggaucucuguauaacguacuacauggcgcugagccgcuccccuacuauacagccgcgcacgcaaugagcuggugucugcagugcucccaggguguugccuaccuucauucaaugcaaccuaaggcucugauccaccgugacuugaaaccacccaaucuccugcugguggccgggggaacuguccucaagauaugugauuuuggcacggcaugcgacauccagacccauaugacaaacaauaaaggcagugcugccuggauggcgccugaaguguucgaggggagcaacuauucugaaaagugugauguguuuuccuggggaauuaucuuaugggaggucauuacuagaaggaaaccauucgacgagaucgguggccccgccuuucggauaaugugggcaguucacaaugggacccgcccuccacugauuaagaaccuuccgaagcccaucgaaucauugaugacaagaugcuggagcaaagauccuagucagaggccaucuauggaggaaauugugaagaucaugacccaccugaugcgguacuuccccggagcugacgagccucuacaguacccaugucaauauuccgaugaaggccagagcaauucggccacuucuacagguuccuuuauggacaucgcuucaaccaacacgaguaauaaaagcgauacuaacauggagcagguacccgccaccaaugacacaauuaagcgccucgaguccaaacugcuuaagaaccaggcaaaacaacagucugaaagcgggcgacugucauugggagccaguagaggcuccagcguggagucucucccgccuacuucagaaggcaagaggaugagugcugauaugagcgagauagaagcgcggaucgcagccaccacagcuuacuccaagcccaaacgugggcaucgcaagaccgccucuuucggaaacauucuggacgucccagagaucgugauaucggguaauggccagccuagaaggcggagcauucaagacuuaacgguuacugggacagagcccggacagguguccucacgaaguucuagcccauccguccgcaugaucaccacuucaggccccacaagcgaaaaaccuaccagaucucacccauggacgccggaugacuccaccgauacaaacgguagugacaauagcauccccauggcauaucugacucucgaucaucagcuucagccucuggccccaugccccaacucuaaggaguccauggcuguguuugaacaacacuguaaaauggcccaggaguacaugaagguacagaccgagauugcauugcuacugcagaggaagcaagaacucguugcggagcuggaccaggaugaaaaagaccagcagaauacaucacggcuugugcaagagcacaagaaacuguuggaugaaaacaagagucucagcacuuauuaccagcagugcaaaaagcagcuggaggucauccgcucgcaacagcagaagagacaagggaccuccuga

SEQ ID NO: 9394 - RNA, 1821 nt, Artificial Sequence
  derived and/or modified sequence opt4 from TAK1__Homo_sapiens__ABC40734
augagcaccgccagcgccgccagcagcagcagcagcagcagcgccggcgagaugaucgaggcccccagccaggugcugaacuucgaggagaucgacuacaaggagaucgagguggaggagguggugggcagaggcgccuucggcguggugugcaaggccaaguggagagccaaggacguggccaucaagcagaucgagagcgagagcgagagaaaggccuucaucguggagcugagacagcugagcagagugaaccaccccaacaucgugaagcuguacggcgccugccugaaccccgugugccuggugauggaguacgccgagggcggcagccuguacaacgugcugcacggcgccgagccccugcccuacuacaccgccgcccacgccaugagcuggugccugcagugcagccagggcguggccuaccugcacagcaugcagcccaaggcccugauccacagagaccugaagccccccaaccugcugcugguggccggcggcaccgugcugaagaucugcgacuucggcaccgccugcgacauccagacccacaugaccaacaacaagggcagcgccgccuggauggcccccgagguguucgagggcagcaacuacagcgagaagugcgacguguucagcuggggcaucauccugugggaggugaucaccagaagaaagcccuucgacgagaucggcggccccgccuucagaaucaugugggccgugcacaacggcaccagacccccccugaucaagaaccugcccaagcccaucgagagccugaugaccagaugcuggagcaaggaccccagccagagacccagcauggaggagaucgugaagaucaugacccaccugaugagauacuuccccggcgccgacgagccccugcaguaccccugccaguacagcgacgagggccagagcaacagcgccaccagcaccggcagcuucauggacaucgccagcaccaacaccagcaacaagagcgacaccaacauggagcaggugcccgccaccaacgacaccaucaagagacuggagagcaagcugcugaagaaccaggccaagcagcagagcgagagcggcagacugagccugggcgccagcagaggcagcagcguggagagccugccccccaccagcgagggcaagagaaugagcgccgacaugagcgagaucgaggccagaaucgccgccaccaccgccuacagcaagcccaagagaggccacagaaagaccgccagcuucggcaacauccuggacgugcccgagaucgugaucagcggcaacggccagcccagaagaagaagcauccaggaccugaccgugaccggcaccgagcccggccaggugagcagcagaagcagcagccccagcgugagaaugaucaccaccagcggccccaccagcgagaagcccaccagaagccaccccuggacccccgacgacagcaccgacaccaacggcagcgacaacagcauccccauggccuaccugacccuggaccaccagcugcagccccuggcccccugccccaacagcaaggagagcauggccguguucgagcagcacugcaagauggcccaggaguacaugaaggugcagaccgagaucgcccugcugcugcagagaaagcaggagcugguggccgagcuggaccaggacgagaaggaccagcagaacaccagcagacuggugcaggagcacaagaagcugcuggacgagaacaagagccugagcaccuacuaccagcagugcaagaagcagcuggaggugaucagaagccagcagcagaagagacagggcaccagcuga

SEQ ID NO: 9395 - RNA, 1821 nt, Artificial Sequence
  derived and/or modified sequence opt5 from TAK1__Homo_sapiens__ABC40734
augagcaccgccuccgcugccucuagcuccucuagcuccucugcgggcgagaugaucgaagcucccagccaggugcugaacuucgaggaaauugacuacaaggagaucgaagucgaggagguuguggggagaggagccuuuggcguggucugcaaagccaaguggcgggcuaaagauguggccauuaagcaaaucgaauccgagagcgaacgcaaggcuuucauuguugagcucagacagcugucucgggugaaucacccuaacaucgucaaacuuuauggggccugucugaauccggugugccucguuauggaguacgcggaaggaggcucccuguauaacgugcuucauggggccgagccccugccuuacuauacagcugcccacgcuaugagcuggugucuccagugcucucagggagucgccuaccugcauuccaugcaacccaaggcgcugauccaccgcgaccucaaaccucccaaucugcuucugguggccggcggcacggugcucaagauuugugauuuugggaccgcuugcgacauccagacacauaugaccaacaauaaaggaagcgccgcuuggauggccccugaagucuucgagggcucuaacuauuccgaaaagugugauguuuuuagcugggggauuauccugugggaggugauuacaagacggaaaccguucgacgagaucggaggccccgccuuucgcauuaugugggcugugcacaaugggaccagaccuccccuuaucaagaaccugccuaagcccaucgaaucccucaugacacggugcuggucuaaagauccgagccagcgcccuuccauggaggaaauugucaagaucaugacccaccugaugagauacuuccccggagcggacgagccucugcaguaccccugucaauauagcgaugaaggccagucuaauuccgccacgagcaccggcucuuuuauggacauugcuagcacaaacaccuccaauaaaucugauacaaacauggaacaggugcccgccaccaaugacacgaucaagcggcucgagagcaaacugcuuaagaaccaggccaaacaacaguccgagagcgggcgccugucucucggagcuuccagaggcagcucuguugagucccugccuccgacaagcgaagggaagcggauguccgccgauaugucugagauugaagcgcgcaucgcugccaccacagccuacagcaagcccaaaagaggacaucggaagaccgcuuccuucggcaacauccuugacgugccugagauugucaucucugggaauggacagcccagacgccggagcauucaagaccugaccgugacaggcacggagccuggccagguuuccagcagaucuuccagccccucugugcgcaugaucaccacauccgggccgaccagcgaaaaaccuacacggucucaccccuggaccccugaugacagcacggauacaaacggauccgacaauagcauucccauggccuaucucacccuggaucaucagcugcagccucucgcucccugcccgaacucuaaggaguccauggccgucuuugaacaacacuguaaaauggcgcaggaguacaugaaggugcagaccgagaucgcccugcuucugcagagaaagcaagaacucgucgcugagcuggaccaggaugaaaaagaccagcagaauacaagccgccuugugcaagagcacaagaaacugcucgaugaaaacaagucccugucuaccuauuaccagcagugcaaaaagcagcuggagguuauccggagccaacagcagaagagacaaggcacauccuga

SEQ ID NO: 9396 - protein, 596 aa, Artificial Sequence
  TAK1__Homo_sapiens__P49116
MTSPSPRIQIISTDSAVASPQRIQIVTDQQTGQKIQIVTAVDASGSPKQQFILTSPDGAGTGKVILASPETSSAKQLIFTTSDNLVPGRIQIVTDSASVERLLGKTDVQRPQVVEYCVVCGDKASGRHYGAVSCEGCKGFFKRSVRKNLTYSCRSNQDCIINKHHRNRCQFCRLKKCLEMGMKMESVQSERKPFDVQREKPSNCAASTEKIYIRKDLRSPLIATPTFVADKDGARQTGLLDPGMLVNIQQPLIREDGTVLLATDSKAETSQGALGTLANVVTSLANLSESLNNGDTSEIQPEDQSASEITRAFDTLAKALNTTDSSSSPSLADGIDTSGGGSIHVISRDQSTPIIEVEGPLLSDTHVTFKLTMPSPMPEYLNVHYICESASRLLFLSMHWARSIPAFQALGQDCNTSLVRACWNELFTLGLAQCAQVMSLSTILAAIVNHLQNSIQEDKLSGDRIKQVMEHIWKLQEFCNSMAKLDIDGYEYAYLKAIVLFSPDHPGLTSTSQIEKFQEKAQMELQDYVQKTYSEDTYRLARILVRLPALRLMSSNITEELFFTGLIGNVSIDSIIPYILKMETAEYNGQITGASL

SEQ ID NO: 9397 - RNA, 1791 nt, Artificial Sequence
  TAK1__Homo_sapiens__AAC50118
augaccagccccuccccacgcauccagauaaucuccaccgacucugcuguagccucaccucagcgcauucagauugucacagaccagcagacaggacagaaaauccagauagucaccgcaguggacgccuccggaucccccaaacagcaguucauccugaccagcccagauggagcuggaacugggaaggugauccuggcuuccccagagacauccagcgccaagcaacucauauucaccaccucagacaaccucgucccuggcaggauccagauugucacggauucugccucuguggagcguuuacuggggaagacggacguccagcggccccaggugguagaguacuguguggucuguggcgacaaagccuccggccgucacuauggggcugucaguugugaagguugcaaagguuucuucaaaaggagugugaggaaaaauuugaccuacagcugccggagcaaccaagacugcaucaucaauaaacaucaccggaaccgcugucaguuuugccggcugaaaaaaugcuuagagaugggcaugaaaauggaaucugugcagagugaacggaagcccuucgaugugcaacgggagaaaccaagcaauugugcugcuucaacugagaaaaucuauauccggaaagaccugagaaguccccugauagcuacucccacguuuguggcagacaaagauggagcaagacaaacaggucuucuugauccagggaugcuugugaacauccagcagccuuugauacgugaggaugguacaguucuccuggccacggauucuaaggcugaaacaagccagggagcucugggcacacuggcaaauguagugaccucccuugccaaccuaagugaaucuuugaacaacggugacacuucagaaauccagccagaggaccagucugcaagugagauaacucgggcauuugauaccuuagcuaaagcacuuaauaccacagacagcuccucuucuccaagcuuggcagaugggauagacaccaguggaggagggagcauccacgucaucagcagagaccagucgacacccaucauugagguugaaggcccccuccuuucagacacacacgucacauuuaagcuaacaaugcccaguccaaugccagaguaccucaacgugcacuacaucugugagucugcaucccgucugcuuuuccucucaaugcacugggcucggucaaucccagccuuucaggcacuugggcaggacugcaacaccagccuugugcgggccugcuggaaugagcucuucacccucggccuggcccagugugcccaggucaugagucucuccaccauccuggcugccauugucaaccaccugcagaacagcauccaggaagauaaacuuucuggugaccggauaaagcaagucauggagcacaucuggaagcugcaggaguucuguaacagcauggcgaagcuggauauagauggcuaugaguaugcauaccuuaaagcuauaguucucuuuagccccgaucauccagguuugaccagcacaagccagauugaaaaauuccaagaaaaggcacagauggaguugcaggacuauguucagaaaaccuacucagaagacaccuaccgauuggcccggauccucguucgccugccggcacucaggcugaugagcuccaacauaacagaagaacuuuuuuuuacuggucucauuggcaauguuucgauagacagcauaauccccuacauccucaagauggagacagcagaguauaauggccagaucaccggagccagucuauag

SEQ ID NO: 9398 - RNA, 1791 nt, Artificial Sequence
  derived and/or modified sequence opt1 from TAK1__Homo_sapiens__AAC50118
augaccagccccuccccgcgcauccagaucaucagcaccgacuccgccguggccagcccccagcggauccagaucgucacggaccagcagaccggccagaagauccagaucgugaccgcgguggacgccuccgggagccccaagcagcaguucauccugaccucccccgacggcgccgggacgggcaaggucauccucgccagcccggagaccuccagcgccaagcagcugaucuucaccaccuccgacaaccuggugcccgggcgcauccagaucgugacggacagcgcguccgucgagcggcuccugggcaagaccgacgugcagcgcccccagguggucgaguacugcguggugugcggcgacaaggccagcgggcggcacuacggcgccgucuccugcgaggggugcaagggcuucuucaagcgcagcgugcggaagaaccugaccuacuccugccgcagcaaccaggacugcaucaucaacaagcaccaccggaaccgcugccaguucugccggcucaagaagugccuggagauggggaugaagauggaguccgugcagagcgagcgcaagcccuucgacguccagcgggagaagccgagcaacugcgccgcguccaccgagaagaucuacauccgcaaggaccugcggagcccccucaucgccacgcccaccuucguggccgacaaggacggcgcccgccagaccggccugcuggaccccgggaugcucgugaacauccagcagccgcugauccgggaggacggcaccguccugcucgccacggacuccaaggcggagaccagccagggggcccugggcacccuggccaacguggugaccucccucgccaaccugagcgagucccugaacaacggcgacacgagcgagauccagcccgaggaccaguccgccagcgagaucacccgcgcguucgacacccucgccaaggcccugaacaccacggacuccagcuccagccccucccuggccgacgggaucgacaccagcggcgggggcuccauccacgucaucagccgggaccaguccacccccaucaucgagguggaggggccgcuccugagcgacacccacgugacguucaagcugaccaugcccagccccaugcccgaguaccucaacguccacuacaucugcgaguccgccagccgccugcuguuccucuccaugcacugggcgcggagcaucccggccuuccaggcccugggccaggacugcaacaccucccuggugcgcgccugcuggaacgagcuguucacccugggccuggcccagugcgcgcaggucaugagccucuccacgauccuggccgccaucgugaaccaccuccagaacagcauccaggaggacaagcucuccggggaccgcaucaagcaggucauggagcacaucuggaagcugcaggaguucugcaacagcauggccaagcuggacaucgacggcuacgaguacgcguaccucaaggccaucgugcuguucucccccgaccaccccgggcugaccagcaccucccagaucgagaaguuccaggagaaggcccagauggagcuccaggacuacgugcagaagaccuacagcgaggacacguaccggcuggcccgcauccuggugcggcuccccgcccugcgccugauguccagcaacaucaccgaggagcuguucuucaccggccucaucgggaacgucuccaucgacagcaucaucccguacauccugaagauggagaccgcggaguacaacggccagaucaccggcgccagccuguga

SEQ ID NO: 9399 - RNA, 1791 nt, Artificial Sequence
  derived and/or modified sequence opt2 from TAK1__Homo_sapiens__AAC50118
augaccucccccuccccccgcauccagaucaucuccaccgacuccgccgucgccuccccccagcgcauccagaucgucaccgaccagcagaccggccagaagauccagaucgucaccgccgucgacgccuccggcucccccaagcagcaguucauccucaccucccccgacggcgccggcaccggcaaggucauccucgccucccccgagaccuccuccgccaagcagcucaucuucaccaccuccgacaaccucguccccggccgcauccagaucgucaccgacuccgccuccgucgagcgccuccucggcaagaccgacguccagcgcccccaggucgucgaguacugcgucgucugcggcgacaaggccuccggccgccacuacggcgccgucuccugcgagggcugcaagggcuucuucaagcgcuccguccgcaagaaccucaccuacuccugccgcuccaaccaggacugcaucaucaacaagcaccaccgcaaccgcugccaguucugccgccucaagaagugccucgagaugggcaugaagauggaguccguccaguccgagcgcaagcccuucgacguccagcgcgagaagcccuccaacugcgccgccuccaccgagaagaucuacauccgcaaggaccuccgcuccccccucaucgccacccccaccuucgucgccgacaaggacggcgcccgccagaccggccuccucgaccccggcaugcucgucaacauccagcagccccucauccgcgaggacggcaccguccuccucgccaccgacuccaaggccgagaccucccagggcgcccucggcacccucgccaacgucgucaccucccucgccaaccucuccgagucccucaacaacggcgacaccuccgagauccagcccgaggaccaguccgccuccgagaucacccgcgccuucgacacccucgccaaggcccucaacaccaccgacuccuccuccucccccucccucgccgacggcaucgacaccuccggcggcggcuccauccacgucaucucccgcgaccaguccacccccaucaucgaggucgagggcccccuccucuccgacacccacgucaccuucaagcucaccaugcccucccccaugcccgaguaccucaacguccacuacaucugcgaguccgccucccgccuccucuuccucuccaugcacugggcccgcuccauccccgccuuccaggcccucggccaggacugcaacaccucccucguccgcgccugcuggaacgagcucuucacccucggccucgcccagugcgcccaggucaugucccucuccaccauccucgccgccaucgucaaccaccuccagaacuccauccaggaggacaagcucuccggcgaccgcaucaagcaggucauggagcacaucuggaagcuccaggaguucugcaacuccauggccaagcucgacaucgacggcuacgaguacgccuaccucaaggccaucguccucuucucccccgaccaccccggccucaccuccaccucccagaucgagaaguuccaggagaaggcccagauggagcuccaggacuacguccagaagaccuacuccgaggacaccuaccgccucgcccgcauccucguccgccuccccgcccuccgccucauguccuccaacaucaccgaggagcucuucuucaccggccucaucggcaacgucuccaucgacuccaucauccccuacauccucaagauggagaccgccgaguacaacggccagaucaccggcgccucccucuga

SEQ ID NO: 9400 - RNA, 1791 nt, Artificial Sequence
  derived and/or modified sequence opt3 from TAK1__Homo_sapiens__AAC50118
augaccagccccuccccuagaauccagauuauaucuacagacucagccguggcuaguccacaaaggauccagauugucacugaucagcagacgggccaaaagauccagauuguuaccgcaguggacgccagcggguccccgaaacagcaguucauccugacaucucccgauggagcggguacuggcaagguaauacucgcuucgccugagaccucaagcgccaaacaacuuaucuuuacaaccagugacaaccuggugccagggcggauucagaucgucacugauuccgcaucuguggaacgcuuguuaggaaagacagacguucagcgaccccagguggucgaguacugcgugguauguggcgauaaagccagcggucgucacuauggggcuguuuccugcgaaggauguaagggcuucuuuaagagaucagugaggaaaaaucugaccuacaguugccggagcaaccaagacuguauuaucaauaagcaucaccgcaacagaugccaguucuguaggcuuaaaaagugccucgagaugggcaugaaaauggaaucuguccaguccgagcggaagccuuuugaugugcaacgcgagaagccaucaaauugugcagccagcacggagaaaauauauauucgaaaggaccugagaaguccccuuaucgcuacuccuaccuucguggccgauaaagacggggcgaggcagacaggacuguuggauccagguaugcucgucaacauucagcagccgcugauccgggaagacggcacuguucugcucgcaaccgacucuaaggccgaaacaucccaaggggcuuuaggaacccuggccaaugugguaacgagccuugcaaacuugucggagucucugaauaacggcgauacuuccgagauccagcccgaagaccagucagcuagugagauuacacgugccuuugauacccuagcgaaagcccucaauacuacagacagcuccucuagcccuucacuggcagaugguauagacaccagugggggaggcuccauccaugugauuagccgcgaucagucuacgccaaucauagaagucgagggcccccuucugucagacacccacgugacauucaaguugacuaugccuaguccaaugcccgaauaccucaacguucauuauauuugcgagagcgcuuccagacuguuauuucugucuaugcacugggccaggucgaucccggcuuuccaagcccucgggcaggauuguaauaccagccuugugcgggcaugcuggaacgagcuguuuacauugggacuagcccagugcgcucaggucaugucccugucaacuauccucgcggcaauugugaaucaucugcaaaacaguauccaggaagacaaacuuucuggugaucgaauuaagcagguaauggagcacauauggaagcugcaggaguucuguaacagcauggccaaauuggacaucgacggcuacgaauaugcuuaccucaaggccauuguucuguuuuccccugaucaccccggguuaaccucaacaagccaaaucgaaaaauuccaggagaaggcacagauggagcugcaagacuacgugcagaaaaccuauucugaagauacuuaccgccuagccagaauccucgucaggcugccagcucuacgguugauguccaguaauauuacggaggaacuguucuuuacaggacucauaggcaacgugagcaucgacucuauuaucccuuauauucugaagauggagaccgccgaauacaauggucagaucacuggggcaucccuuuga

SEQ ID NO: 9401 - RNA, 1791 nt, Artificial Sequence
  derived and/or modified sequence opt4 from TAK1__Homo_sapiens__AAC50118
augaccagccccagccccagaauccagaucaucagcaccgacagcgccguggccagcccccagagaauccagaucgugaccgaccagcagaccggccagaagauccagaucgugaccgccguggacgccagcggcagccccaagcagcaguucauccugaccagccccgacggcgccggcaccggcaaggugauccuggccagccccgagaccagcagcgccaagcagcugaucuucaccaccagcgacaaccuggugcccggcagaauccagaucgugaccgacagcgccagcguggagagacugcugggcaagaccgacgugcagagaccccaggugguggaguacugcguggugugcggcgacaaggccagcggcagacacuacggcgccgugagcugcgagggcugcaagggcuucuucaagagaagcgugagaaagaaccugaccuacagcugcagaagcaaccaggacugcaucaucaacaagcaccacagaaacagaugccaguucugcagacugaagaagugccuggagaugggcaugaagauggagagcgugcagagcgagagaaagcccuucgacgugcagagagagaagcccagcaacugcgccgccagcaccgagaagaucuacaucagaaaggaccugagaagcccccugaucgccacccccaccuucguggccgacaaggacggcgccagacagaccggccugcuggaccccggcaugcuggugaacauccagcagccccugaucagagaggacggcaccgugcugcuggccaccgacagcaaggccgagaccagccagggcgcccugggcacccuggccaacguggugaccagccuggccaaccugagcgagagccugaacaacggcgacaccagcgagauccagcccgaggaccagagcgccagcgagaucaccagagccuucgacacccuggccaaggcccugaacaccaccgacagcagcagcagccccagccuggccgacggcaucgacaccagcggcggcggcagcauccacgugaucagcagagaccagagcacccccaucaucgagguggagggcccccugcugagcgacacccacgugaccuucaagcugaccaugcccagccccaugcccgaguaccugaacgugcacuacaucugcgagagcgccagcagacugcuguuccugagcaugcacugggccagaagcauccccgccuuccaggcccugggccaggacugcaacaccagccuggugagagccugcuggaacgagcuguucacccugggccuggcccagugcgcccaggugaugagccugagcaccauccuggccgccaucgugaaccaccugcagaacagcauccaggaggacaagcugagcggcgacagaaucaagcaggugauggagcacaucuggaagcugcaggaguucugcaacagcauggccaagcuggacaucgacggcuacgaguacgccuaccugaaggccaucgugcuguucagccccgaccaccccggccugaccagcaccagccagaucgagaaguuccaggagaaggcccagauggagcugcaggacuacgugcagaagaccuacagcgaggacaccuacagacuggccagaauccuggugagacugcccgcccugagacugaugagcagcaacaucaccgaggagcuguucuucaccggccugaucggcaacgugagcaucgacagcaucauccccuacauccugaagauggagaccgccgaguacaacggccagaucaccggcgccagccuguga

SEQ ID NO: 9402 - RNA, 1791 nt, Artificial Sequence
  derived and/or modified sequence opt5 from TAK1__Homo_sapiens__AAC50118
augaccagccccuccccuagaauccagauuaucucuacagacagcgccguggcuuccccgcaacggauucagaucgucacggaucagcagaccggccaaaagauucagaucguuacagccguggacgcgucugggagccccaaacagcaguucauccugaccuccccugauggagcuggcacagggaaggugauucucgccucucccgagaccagcuccgccaaacaacugaucuuuacaaccagcgacaaccuugucccuggacgcauucagaucgugacggauucugcuuccguugaaagacugcucggcaagaccgacgugcagcggccccaggucguggaguacugcguuguguguggggauaaagccagcggacgccacuauggcgcugucucuugcgaaggcuguaagggguucuuuaagagauccgugcggaaaaaucugacauacagcugccgcucuaaccaagacuguauuaucaauaagcaucacagaaaccggugccaguucugucgccuuaaaaagugccuggagaugggaaugaaaauggaauccgugcagagcgagagaaagccuuuugauguccaacgggagaagccguccaauugugccgcgucuaccgaaaagauuuauauccgcaaggaccucagaagcccccugaucgccacaccuaccuucguugcugauaaagacggcgcccggcagacggggcugcucgaucccggaaugcuggugaacauucagcagccucuuauccgcgaggacggcacagugcugcucgcuaccgacuccaaggccgaaacaagccaaggggcgcugggaacccuugccaaugucgugaccucucuggcuaaccucuccgagagccugaauaacggcgauacaucugagauucagcccgaagaccagagcgccuccgagaucacgagagcuuuugauacccuggccaaagcccucaauacaaccgacucuagcuccagcccgucucuggcugauggcauugacacauccgggggaggcagcauccauguuaucucucgggaucaguccaccccuauuaucgaaguggaggggccccuucugagcgacacgcacgucacauucaagcucaccaugccuucccccaugcccgaauaccugaacgugcauuauauuugcgagucugcgagcagacuucuguuucucuccaugcacugggcccgcucuaucccugcuuuccaagcccugggacaggauuguaauaccagccugguucgggccugcuggaacgagcucuuuacacugggccuugcucagugcgcccaggugaugucccugagcaccauucucgcggcuaucgucaaucaucugcaaaacucuauccaggaagacaaacuuuccggggauagaauuaaacaggugauggagcacaucuggaagcugcaggaguucuguaacagcauggccaaacucgacauugacggauacgaauaugccuaccugaaggcuaucguccuguuuucuccggaucaccccggccucacauccacgagccaaauugaaaaauuccaggagaaggcccagauggagcugcaagacuacgugcagaaaaccuauucugaagauacauaccgccuugcucggauccugguuagacucccugcccugcgccugaugagcuccaauauuaccgaggaacuuuucuuuacaggccucaucgggaacgugagcaucgacucuauuauccccuauauucugaagauggagaccgcggaauacaauggacagaucacgggcgccucccuguga

SEQ ID NO: 9403 - protein, 729 aa, Artificial Sequence
  TBK1__Homo_sapiens__Q9UHD2
MQSTSNHLWLLSDILGQGATANVFRGRHKKTGDLFAIKVFNNISFLRPVDVQMREFEVLKKLNHKNIVKLFAIEEETTTRHKVLIMEFCPCGSLYTVLEEPSNAYGLPESEFLIVLRDVVGGMNHLRENGIVHRDIKPGNIMRVIGEDGQSVYKLTDFGAARELEDDEQFVSLYGTEEYLHPDMYERAVLRKDHQKKYGATVDLWSIGVTFYHAATGSLPFRPFEGPRRNKEVMYKIITGKPSGAISGVQKAENGPIDWSGDMPVSCSLSRGLQVLLTPVLANILEADQEKCWGFDQFFAETSDILHRMVIHVFSLQQMTAHKIYIHSYNTATIFHELVYKQTKIISSNQELIYEGRRLVLEPGRLAQHFPKTTEENPIFVVSREPLNTIGLIYEKISLPKVHPRYDLDGDASMAKAITGVVCYACRIASTLLLYQELMRKGIRWLIELIKDDYNETVHKKTEVVITLDFCIRNIEKTVKVYEKLMKINLEAAELGEISDIHTKLLRLSSSQGTIETSLQDIDSRLSPGGSLADAWAHQEGTHPKDRNVEKLQVLLNCMTEIYYQFKKDKAERRLAYNEEQIHKFDKQKLYYHATKAMTHFTDECVKKYEAFLNKSEEWIRKMLHLRKQLLSLTNQCFDIEEEVSKYQEYTNELQETLPQKMFTASSGIKHTMTPIYPSSNTLVEMTLGMKKLKEEMEGVVKELAENNHILERFGSLTMDGGLRNVDCL

SEQ ID NO: 9404 - RNA, 2190 nt, Artificial Sequence
  TBK1__Homo_sapiens__AAF05989
augcagagcacuucuaaucaucuguggcuuuuaucugauauuuuaggccaaggagcuacugcaaaugucuuucguggaagacauaagaaaacuggugauuuauuugcuaucaaaguauuuaauaacauaagcuuccuucguccaguggauguucaaaugagagaauuugaaguguugaaaaaacucaaucacaaaaauauugucaaauuauuugcuauugaagaggagacaacaacaagacauaaaguacuuauuauggaauuuuguccaugugggaguuuauacacuguuuuagaagaaccuucuaaugccuauggacuaccagaaucugaauucuuaauuguuuugcgagaugugguggguggaaugaaucaucuacgagagaaugguauagugcaccgugauaucaagccaggaaauaucaugcguguuauaggggaagauggacagucuguguacaaacucacagauuuuggugcagcuagagaauuagaagaugaugagcaguuuguuucucuguauggcacagaagaauauuugcacccugauauguaugagagagcagugcuaagaaaagaucaucagaagaaauauggagcaacaguugaucuuuggagcauugggguaacauuuuaccaugcagcuacuggaucacugccauuuagacccuuugaagggccucguaggaauaaagaagugauguauaaaauaauuacaggaaagccuucuggugcaauaucuggaguacagaaagcagaaaauggaccaauugacuggaguggagacaugccuguuucuugcagucuuucucggggucuucagguucuacuuaccccuguucuugcaaacauccuugaagcagaucaggaaaaguguugggguuuugaccaguuuuuugcagaaacuagugauauacuucaccgaaugguaauucauguuuuuucgcuacaacaaaugacagcucauaagauuuauauucauagcuauaauacugcuacuauauuucaugaacugguauauaaacaaaccaaaauuauuucuucaaaucaagaacuuaucuacgaagggcgacgcuuagucuuagaaccuggaaggcuggcacaacauuucccuaaaacuacugaggaaaacccuauauuuguaguaagccgggaaccucugaauaccauaggauuaauauaugaaaaaauuucccucccuaaaguacauccacguuaugauuuagacggggaugcuagcauggcuaaggcaauaacagggguuguguguuaugccugcagaauugccaguaccuuacugcuuuaucaggaauuaaugcgaaaggggauacgauggcugauugaauuaauuaaagaugauuacaaugaaacuguucacaaaaagacagaaguugugaucacauuggauuucuguaucagaaacauugaaaaaacugugaaaguauaugaaaaguugaugaagaucaaccuggaagcggcagaguuaggugaaauuucagacauacacaccaaauuguugagacuuuccaguucucagggaacaauagaaaccagucuucaggauaucgacagcagauuaucuccagguggaucacuggcagacgcaugggcacaucaagaaggcacucauccgaaagacagaaauguagaaaaacuacaaguccuguuaaauugcaugacagagauuuacuaucaguucaaaaaagacaaagcagaacguagauuagcuuauaaugaagaacaaauccacaaauuugauaagcaaaaacuguauuaccaugccacaaaagcuaugacgcacuuuacagaugaauguguuaaaaaguaugaggcauuuuugaauaagucagaagaauggauaagaaagaugcuucaucuuaggaaacaguuauuaucgcugacuaaucaguguuuugauauugaagaagaaguaucaaaauaucaagaauauacuaaugaguuacaagaaacucugccucagaaaauguuuacagcuuccaguggaaucaaacauaccaugaccccaauuuauccaaguucuaacacauuaguagaaaugacucuugguaugaagaaauuaaaggaagagauggaaggggugguuaaagaacuugcugaaaauaaccacauuuuagaaagguuuggcucuuuaaccauggaugguggccuucgcaacguugacugucuuuag

SEQ ID NO: 9405 - RNA, 2190 nt, Artificial Sequence
  derived and/or modified sequence opt1 from TBK1__Homo_sapiens__AAF05989
augcagagcaccuccaaccaccuguggcuccugagcgacauccugggccagggggccaccgccaacguguuccgcggccggcacaagaagacgggggaccucuucgcgaucaaggucuucaacaacaucuccuuccugcgccccguggacgugcagaugcgggaguucgagguccugaagaagcucaaccacaagaacaucgugaagcuguucgccaucgaggaggagaccaccacccgccacaaggugcugaucauggaguucugcccgugcggcagccucuacacgguccuggaggagcccuccaacgccuacgggcugcccgagagcgaguuccucaucgugcugcgggacguggucggcggcaugaaccaccuccgcgagaacgggaucgugcaccgggacaucaagcccggcaacaucaugcgcgugaucggggaggacggccaguccgucuacaagcugaccgacuucggggccgcccgggagcuggaggacgacgagcaguucgugagccuguacggcaccgaggaguaccuccacccggacauguacgagcgcgcggugcugcggaaggaccaccagaagaaguacggcgccaccgucgaccugugguccaucggggugacguucuaccacgccgccaccggcagccuccccuuccgccccuucgaggggccccggcgcaacaaggaggugauguacaagaucaucaccggcaagccguccggcgcgaucagcgggguccagaaggccgagaacggccccaucgacugguccggggacaugcccgugagcugcucccugagccggggccuccaggugcugcugacccccguccuggccaacauccucgaggccgaccaggagaagugcuggggguucgaccaguucuucgccgagacguccgacauccugcaccgcauggugauccacguguucagccugcagcagaugaccgcgcacaagaucuacauccacuccuacaacaccgccaccaucuuccacgagcucgucuacaagcagacgaagaucaucagcagcaaccaggagcugaucuacgagggccggcgccuggugcucgagccgggccggcuggcccagcacuuccccaagaccaccgaggagaaccccaucuucgucgugucccgcgagccccugaacaccaucgggcucaucuacgagaagaucagccugccgaaggugcacccccgguacgaccuggacggcgacgccuccauggccaaggcgaucacgggggucgugugcuacgccugccgcaucgccagcacccuccugcuguaccaggagcucaugcgcaagggcauccgguggcugaucgagcugaucaaggacgacuacaacgagaccgugcacaagaagaccgaggucgugaucacgcucgacuucugcauccgcaacaucgagaagaccgugaaggucuacgagaagcugaugaagaucaaccuggaggccgccgagcucggggagaucuccgacauccacaccaagcugcugcggcugagcuccagccagggcaccaucgagacgucccuccaggacaucgacagccgccugucccccggcgggagccuggcggacgccugggcccaccaggagggcacccaccccaaggaccggaacguggagaagcuccaggugcugcugaacugcaugaccgagaucuacuaccaguucaagaaggacaaggccgagcgccggcucgccuacaacgaggagcagauccacaaguucgacaagcagaagcuguacuaccacgcgaccaaggccaugacgcacuucaccgacgagugcgucaagaaguacgaggccuuccugaacaaguccgaggaguggauccgcaagaugcuccaccuccggaagcagcugcugagccugaccaaccagugcuucgacaucgaggaggagguguccaaguaccaggaguacaccaacgagcugcaggagacgcucccgcagaagauguucaccgccagcuccgggaucaagcacaccaugacccccaucuaccccagcuccaacacccugguggagaugacgcugggcaugaagaagcucaaggaggagauggagggggucgugaaggagcuggcggagaacaaccacauccuggagcgcuucggcagccucaccauggacggcgggcugcggaacguggacugccuguga

SEQ ID NO: 9406 - RNA, 2190 nt, Artificial Sequence
  derived and/or modified sequence opt2 from TBK1__Homo_sapiens__AAF05989
augcaguccaccuccaaccaccucuggcuccucuccgacauccucggccagggcgccaccgccaacgucuuccgcggccgccacaagaagaccggcgaccucuucgccaucaaggucuucaacaacaucuccuuccuccgccccgucgacguccagaugcgcgaguucgagguccucaagaagcucaaccacaagaacaucgucaagcucuucgccaucgaggaggagaccaccacccgccacaagguccucaucauggaguucugccccugcggcucccucuacaccguccucgaggagcccuccaacgccuacggccuccccgaguccgaguuccucaucguccuccgcgacgucgucggcggcaugaaccaccuccgcgagaacggcaucguccaccgcgacaucaagcccggcaacaucaugcgcgucaucggcgaggacggccaguccgucuacaagcucaccgacuucggcgccgcccgcgagcucgaggacgacgagcaguucgucucccucuacggcaccgaggaguaccuccaccccgacauguacgagcgcgccguccuccgcaaggaccaccagaagaaguacggcgccaccgucgaccucugguccaucggcgucaccuucuaccacgccgccaccggcucccuccccuuccgccccuucgagggcccccgccgcaacaaggaggucauguacaagaucaucaccggcaagcccuccggcgccaucuccggcguccagaaggccgagaacggccccaucgacugguccggcgacaugcccgucuccugcucccucucccgcggccuccagguccuccucacccccguccucgccaacauccucgaggccgaccaggagaagugcuggggcuucgaccaguucuucgccgagaccuccgacauccuccaccgcauggucauccacgucuucucccuccagcagaugaccgcccacaagaucuacauccacuccuacaacaccgccaccaucuuccacgagcucgucuacaagcagaccaagaucaucuccuccaaccaggagcucaucuacgagggccgccgccucguccucgagcccggccgccucgcccagcacuuccccaagaccaccgaggagaaccccaucuucgucgucucccgcgagccccucaacaccaucggccucaucuacgagaagaucucccuccccaagguccacccccgcuacgaccucgacggcgacgccuccauggccaaggccaucaccggcgucgucugcuacgccugccgcaucgccuccacccuccuccucuaccaggagcucaugcgcaagggcauccgcuggcucaucgagcucaucaaggacgacuacaacgagaccguccacaagaagaccgaggucgucaucacccucgacuucugcauccgcaacaucgagaagaccgucaaggucuacgagaagcucaugaagaucaaccucgaggccgccgagcucggcgagaucuccgacauccacaccaagcuccuccgccucuccuccucccagggcaccaucgagaccucccuccaggacaucgacucccgccucucccccggcggcucccucgccgacgccugggcccaccaggagggcacccaccccaaggaccgcaacgucgagaagcuccagguccuccucaacugcaugaccgagaucuacuaccaguucaagaaggacaaggccgagcgccgccucgccuacaacgaggagcagauccacaaguucgacaagcagaagcucuacuaccacgccaccaaggccaugacccacuucaccgacgagugcgucaagaaguacgaggccuuccucaacaaguccgaggaguggauccgcaagaugcuccaccuccgcaagcagcuccucucccucaccaaccagugcuucgacaucgaggaggaggucuccaaguaccaggaguacaccaacgagcuccaggagacccucccccagaagauguucaccgccuccuccggcaucaagcacaccaugacccccaucuaccccuccuccaacacccucgucgagaugacccucggcaugaagaagcucaaggaggagauggagggcgucgucaaggagcucgccgagaacaaccacauccucgagcgcuucggcucccucaccauggacggcggccuccgcaacgucgacugccucuga

SEQ ID NO: 9407 - RNA, 2190 nt, Artificial Sequence
  derived and/or modified sequence opt3 from TBK1__Homo_sapiens__AAF05989
augcagagcaccuccaaccaccuguggcuccuuucugacauccugggccaaggggccacagcuaauguguucagaggaaggcauaagaaaacuggugauuuguuugcaauuaaggucuucaacaauauaucauuuuuacggcccguugacgugcagaugcgcgaguucgaaguacugaaaaagcuaaaccacaaaaauaucgugaagcucuuugccauugaggaagagacgaccacacgacauaagguccugaucauggaguucugcccuuguggcagucuuuacacugugcuggaggagccaagcaacgcguauggguugccggaauccgaguuucucauuguucugcgugauguggucggaggcaugaaucaccugagagaaaacgguaucgugcauagggacauaaaacccgggaauaucaugcggguaauuggagaggauggccagucuguuuacaagcucaccgacuucggcgcugcccgcgaguuagaagaugacgagcaguuugugucgcuguaugggacagaagaguaccuucacccugauauguaugaaagagcagucuugaggaaagaccaccaaaagaaauacggagccaccguggaucuguggucaaucggugugacuuucuaucaugcugcaacaggcagccuaccauuucggcccuucgaggggccucgccgaaacaaggaggucauguacaagauuaucaccggaaaaccaaguggcgccauauccgguguucagaaggcugaaaaugggcccauugacuggucuggagauaugccugugagcugcucccucucaagaggccugcagguacuucugacgccaguguuggccaacauccucgaggcggaccaggaaaaauguuggggcuuugaccaauucuucgcagagaccagugauauucugcacaggauggucauccauguguuuagcuuacagcagaugacugcccacaagaucuacauucacucuuauaauacagcuacuauauuccaugaacugguuuacaaacagaccaagaucauuuccucaaaccaagagcucaucuaugaggggcggcgucuugugcuggaaccgggacgcuuggcccagcacuuucccaaaacaaccgaggaaaauccuauauucgucgugagcagagagccacuaaacacgauuggucugaucuacgaaaagaucagucuccccaagguacauccuagguaugaccuggauggcgacgcaucuauggcuaaagccauuacugggguugugugcuacgcgugucggaucgccuccacacuucuguuguaucaggagcucaugcgaaagggcauucgcuggcugauagaguuaaucaaagaugacuacaacgaaaccguccacaagaaaacugagguggucauuacacuggauuuuugcaucagaaauaucgaaaagaccgugaagguuuacgagaaacuaaugaagauuaaccucgaggcagcugaacugggagagauaagcgacauccauacgaaacuuuugaggcugucgucuucccaagguaccauugaaacaucacuccaggauaucgacagucggcugagcccagggggcucccuugccgaugcuugggcccaccaggagggaacucaccccaaggaccgcaauguggaaaaacugcagguauugcucaacuguaugaccgagauuuauuaccaauucaagaaggacaaagcagagagaaggcuggccuauaaugaagaacagauccauaaguuugauaaacagaaguuauacuaucacgcuacaaaagcgaugacucauuucaccgacgaaugcgucaagaaguacgaggcauuucugaacaaaucugaagaguggauacguaagaugcuacaccuccggaaacagcugcuuagcuugacaaaucaauguuucgauaucgaggaagaggugucaaaguaucaggaauacaccaacgagcugcaggaaacucucccgcagaaaauguuuacggccaguuccggcauuaagcacacaaugaccccuaucuaccccagcucuaauacucugguugagaugaccuuagggaugaaaaagcugaaggaggaaauggagggaguggucaaagaacuugcugagaacaaucauauuuuggagcgauucgguucacucacaauggacggcgggcugagaaacguggauugccuauga

SEQ ID NO: 9408 - RNA, 2190 nt, Artificial Sequence
  derived and/or modified sequence opt4 from TBK1__Homo_sapiens__AAF05989
augcagagcaccagcaaccaccuguggcugcugagcgacauccugggccagggcgccaccgccaacguguucagaggcagacacaagaagaccggcgaccuguucgccaucaagguguucaacaacaucagcuuccugagacccguggacgugcagaugagagaguucgaggugcugaagaagcugaaccacaagaacaucgugaagcuguucgccaucgaggaggagaccaccaccagacacaaggugcugaucauggaguucugccccugcggcagccuguacaccgugcuggaggagcccagcaacgccuacggccugcccgagagcgaguuccugaucgugcugagagacguggugggcggcaugaaccaccugagagagaacggcaucgugcacagagacaucaagcccggcaacaucaugagagugaucggcgaggacggccagagcguguacaagcugaccgacuucggcgccgccagagagcuggaggacgacgagcaguucgugagccuguacggcaccgaggaguaccugcaccccgacauguacgagagagccgugcugagaaaggaccaccagaagaaguacggcgccaccguggaccuguggagcaucggcgugaccuucuaccacgccgccaccggcagccugcccuucagacccuucgagggccccagaagaaacaaggaggugauguacaagaucaucaccggcaagcccagcggcgccaucagcggcgugcagaaggccgagaacggccccaucgacuggagcggcgacaugcccgugagcugcagccugagcagaggccugcaggugcugcugacccccgugcuggccaacauccuggaggccgaccaggagaagugcuggggcuucgaccaguucuucgccgagaccagcgacauccugcacagaauggugauccacguguucagccugcagcagaugaccgcccacaagaucuacauccacagcuacaacaccgccaccaucuuccacgagcugguguacaagcagaccaagaucaucagcagcaaccaggagcugaucuacgagggcagaagacuggugcuggagcccggcagacuggcccagcacuuccccaagaccaccgaggagaaccccaucuucguggugagcagagagccccugaacaccaucggccugaucuacgagaagaucagccugcccaaggugcaccccagauacgaccuggacggcgacgccagcauggccaaggccaucaccggcguggugugcuacgccugcagaaucgccagcacccugcugcuguaccaggagcugaugagaaagggcaucagauggcugaucgagcugaucaaggacgacuacaacgagaccgugcacaagaagaccgagguggugaucacccuggacuucugcaucagaaacaucgagaagaccgugaagguguacgagaagcugaugaagaucaaccuggaggccgccgagcugggcgagaucagcgacauccacaccaagcugcugagacugagcagcagccagggcaccaucgagaccagccugcaggacaucgacagcagacugagccccggcggcagccuggccgacgccugggcccaccaggagggcacccaccccaaggacagaaacguggagaagcugcaggugcugcugaacugcaugaccgagaucuacuaccaguucaagaaggacaaggccgagagaagacuggccuacaacgaggagcagauccacaaguucgacaagcagaagcuguacuaccacgccaccaaggccaugacccacuucaccgacgagugcgugaagaaguacgaggccuuccugaacaagagcgaggaguggaucagaaagaugcugcaccugagaaagcagcugcugagccugaccaaccagugcuucgacaucgaggaggaggugagcaaguaccaggaguacaccaacgagcugcaggagacccugccccagaagauguucaccgccagcagcggcaucaagcacaccaugacccccaucuaccccagcagcaacacccugguggagaugacccugggcaugaagaagcugaaggaggagauggagggcguggugaaggagcuggccgagaacaaccacauccuggagagauucggcagccugaccauggacggcggccugagaaacguggacugccuguga

SEQ ID NO: 9409 - RNA, 2190 nt, Artificial Sequence
  derived and/or modified sequence opt5 from TBK1__Homo_sapiens__AAF05989
augcagagcaccuccaaccaccuguggcuccugucugacauccuuggccaaggggccacagcuaauguguucagaggacggcauaagaaaacgggcgaucuguuugccauuaaggucuucaacaauaucagcuuucuccgccccguugacgugcagaugagagaguucgaagugcugaaaaagcugaaccacaaaaauauugucaagcuguuugcgaucgaggaagagaccacaacccggcauaaggugcucauuauggaguucugcccuugugggucccuguacacaguucuggaggagccgucuaacgcuuauggacuccccgaaagcgaguuucugaucgugcuucgcgaugucgugggcgggaugaaucaccugagagaaaacggaaucguucaucgggacauuaaaccuggcaauaucaugcgcgugauuggcgaggaugggcaguccgucuacaagcucaccgacuucggagccgccagagagcuggaagaugacgagcaguuugugucucuuuauggcacagaagaguaccugcaccccgauauguaugaacgggcugugcuccgcaaagaccaccaaaagaaauacggggccaccgucgaucuguggagcaucggaguuacguucuaucaugcugccaccggcucccugccuuuuagacccuucgaggggccucggcgcaacaaggaggugauguacaagauuaucacaggaaaaccgagcggcgcgauuucuggcgugcagaaggccgaaaaugggcccaucgacugguccggagauaugccugucagcugcucucucuccagaggccuucaggugcuucugacccccguucucgcuaacauccuggaggccgaccaggaaaaauguuggggguuugaccaauucuucgcugagacaagcgauauucuucaccggauggugauccaugucuuuucucugcagcagaugaccgcccacaagauuuacauccacuccuauaauacggcgacaauuuuccaugaacucguguacaaacagaccaagaucaucagcuccaaccaagagcugauuuaugagggacgcagacugguucucgaaccuggccggcuggcccagcacuuucccaaaacaaccgaggaaaauccgaucuucguggucucuagagagccucuuaacaccauugggcugaucuacgaaaagauuagccuccccaaggugcauccucgcuaugaccuggauggagacgcuuccauggccaaagcuaucacaggcgucgugugcuacgccugucggaucgccagcacgcuucugcucuaucaggagcugaugagaaagggcauucgcuggcugaucgagcucauuaaagaugacuacaacgaaaccguucacaagaaaacagagguggucaucacccuggauuuuugcauucggaauaucgaaaagacagugaagguuuacgagaaacuuaugaagauuaaccuggaggcugcggaacucggggagaucucugacauccauaccaaacugcugagacuuuccagcucucaaggaacgauugaaacaagccuccaggauaucgacucccgccugucucccggcgggagccuggccgaugcuugggcccaccaggagggaacccaccccaaggaccggaauguggaaaaacuccagguccugcuuaacuguaugaccgagauuuauuaccaauucaagaaggacaaagccgagagacgccuggcuuauaaugaagaacagauccauaaguuugauaaacagaagcucuacuaucacgccacaaaagcgaugacccauuucacagacgaaugcgugaagaaguacgaggcuuuucugaacaaauccgaagaguggauucggaagaugcugcaccuuagaaaacagcuccugagccugacgaaucaauguuucgauaucgaggaagaggugucuaaguaucaggaauacaccaacgagcuccaggaaacacugccucagaaaauguuuaccgccuccagcggcaucaagcacacaaugaccccgauuuaccccucuuccaauacgcuuguugagaugacccuggggaugaaaaagcucaaggaggaaauggagggcgucgugaaagaacuggccgagaacaaucauauccuggagcgcuucggaagccuuacaauggacggcgggcuccggaacguggauugccuguga

SEQ ID NO: 9410 - protein, 712 aa, Artificial Sequence
  TICAM1__Homo_sapiens__Q8IUC6
MACTGPSLPSAFDILGAAGQDKLLYLKHKLKTPRPGCQGQDLLHAMVLLKLGQETEARISLEALKADAVARLVARQWAGVDSTEDPEEPPDVSWAVARLYHLLAEEKLCPASLRDVAYQEAVRTLSSRDDHRLGELQDEARNRCGWDIAGDPGSIRTLQSNLGCLPPSSALPSGTRSLPRPIDGVSDWSQGCSLRSTGSPASLASNLEISQSPTMPFLSLHRSPHGPSKLCDDPQASLVPEPVPGGCQEPEEMSWPPSGEIASPPELPSSPPPGLPEVAPDATSTGLPDTPAAPETSTNYPVECTEGSAGPQSLPLPILEPVKNPCSVKDQTPLQLSVEDTTSPNTKPCPPTPTTPETSPPPPPPPPSSTPCSAHLTPSSLFPSSLESSSEQKFYNFVILHARADEHIALRVREKLEALGVPDGATFCEDFQVPGRGELSCLQDAIDHSAFIILLLTSNFDCRLSLHQVNQAMMSNLTRQGSPDCVIPFLPLESSPAQLSSDTASLLSGLVRLDEHSQIFARKVANTFKPHRLQARKAMWRKEQDTRALREQSQHLDGERMQAAALNAAYSAYLQSYLSYQAQMEQLQVAFGSHMSFGTGAPYGARMPFGGQVPLGAPPPFPTWPGCPQPPPLHAWQAGTPPPPSPQPAAFPQSLPFPQSPAFPTASPAPPQSPGLQPLIIHHAQMVQLGLNNHMWNQRGSQAPEDKTQEAE

SEQ ID NO: 9411 - RNA, 2139 nt, Artificial Sequence
  TICAM1__Homo_sapiens__AAI36557
auggccugcacgggcccaucacuuccuagcgccuucgacauucuaggugcagcaggccaggacaagcucuuguaucugaagcacaaacugaagaccccacgcccaggcugccaggggcaggaccuccugcaugccaugguucuccugaagcugggccaggaaacugaggccaggaucucucuagaggcauugaaggccgaugcgguggcccggcugguggcccgccagugggcuggcguggacagcaccgaggacccagaggagcccccagauguguccugggcuguggcccgcuuguaccaccugcuggcugaggagaagcugugccccgccucgcugcgggacguggccuaccaggaagccguccgcacccucagcuccagggacgaccaccggcugggggaacuucaggaugaggcccgaaaccggugugggugggacauugcuggggauccagggagcauccggacgcuccaguccaaucugggcugccucccaccauccucggcuuugcccucugggaccaggagccucccacgccccauugacgguguuucggacuggagccaagggugcucccugcgauccacuggcagcccugccucccuggccagcaacuuggaaaucagccaguccccuaccaugcccuuccucagccugcaccgcagcccacaugggcccagcaagcucugugacgacccccaggccagcuuggugcccgagccuguccccgguggcugccaggagccugaggagaugagcuggccgccaucgggggagauugccagcccaccagagcugccaagcagcccaccuccugggcuucccgaaguggccccagaugcaaccuccacuggccucccugauacccccgcagcuccagaaaccagcaccaacuacccaguggagugcaccgaggggucugcaggcccccagucucuccccuugccuauucuggagccggucaaaaaccccugcucugucaaagaccagacgccacuccaacuuucuguagaagauaccaccucuccaaauaccaagccgugcccaccuacucccaccaccccagaaacauccccuccuccuccuccuccuccuccuucaucuacuccuuguucagcucaccugacccccuccucccuguucccuuccucccuggaaucaucaucggaacagaaauucuauaacuuugugauccuccacgccagggcagacgaacacaucgcccugcggguucgggagaagcuggaggcccuuggcgugcccgacggggccaccuucugcgaggauuuccaggugccggggcgcggggagcugagcugccugcaggacgccauagaccacucagcuuucaucauccuacuucucaccuccaacuucgacugucgccugagccugcaccaggugaaccaagccaugaugagcaaccucacgcgacaggggucgccagacugugucauccccuuccugccccuggagagcuccccggcccagcucagcuccgacacggccagccugcucuccgggcuggugcggcuggacgaacacucccagaucuucgccaggaagguggccaacaccuucaagccccacaggcuucaggcccgaaaggccauguggaggaaggaacaggacacccgagcccugcgggaacagagccaacaccuggauggugagcggaugcaggcggcggcacugaacgcagccuacucagccuaccuccagagcuacuuguccuaccaggcacagauggagcagcuccagguggcuuuugggagccacaugucauuugggacuggggcgcccuauggggcucgaaugcccuuugggggccaggugccccugggagccccgccacccuuucccacuuggccggggugcccgcagccgccaccccugcacgcauggcaggcuggcacccccccaccgcccuccccacagccagcagccuuuccacagucacugcccuucccgcaguccccagccuucccuacggccucacccgcacccccucagagcccagggcugcaaccccucauuauccaccacgcacagaugguacagcuggggcugaacaaccacauguggaaccagagagggucccaggcgcccgaggacaagacgcaggaggcagaauga

SEQ ID NO: 9412 - RNA, 2139 nt, Artificial Sequence
  derived and/or modified sequence opt1 from TICAM1__Homo_sapiens__AAI36557
auggccugcaccggccccagccugccguccgccuucgacauccucggggcggccggccaggacaagcugcuguaccucaagcacaagcugaagacgccccgccccgggugccagggccaggaccugcuccacgccauggugcugcugaagcucgggcaggagaccgaggcccggaucagccuggaggcccugaaggcggacgccgucgcccgccucguggcccggcagugggcgggcguggacuccaccgaggaccccgaggagccgcccgacgucagcugggccguggcccgccuguaccaccuccucgccgaggagaagcugugccccgccucccugcgggacguggcguaccaggaggccguccgcacccucagcucccgggacgaccaccgccugggcgagcugcaggacgaggcccggaaccgcugcgggugggacaucgccggcgaccccgggagcauccggacccuccaguccaaccugggcugccugccgcccagcuccgcccuccccagcgggacgcgcucccugccccggccgaucgacggcgugagcgacuggucccagggcugcagccugcgcuccaccgggagccccgcgucccucgccagcaaccuggagaucagccagucccccaccaugcccuuccugagccuccaccgguccccgcacggccccagcaagcugugcgacgacccccaggccucccuggugcccgagccgguccccgggggcugccaggagcccgaggagaugagcuggcccccguccggcgagaucgccagcccgcccgagcugcccuccagcccgccgcccgggcugcccgagguggcccccgacgcgaccuccacgggccugcccgacacccccgccgcccccgagaccagcaccaacuaccccguggagugcacggagggguccgccggcccccagagccucccccugccgauccuggagcccgucaagaaccccugcuccgugaaggaccagacgccccuccagcugagcguggaggacaccaccuccccgaacaccaagcccugcccgcccacccccaccacccccgagacgagcccgccgcccccgccgccgccgcccuccagcacccccugcagcgcccaccugacccccuccagccucuuccccuccagccuggaguccagcuccgagcagaaguucuacaacuucgucauccugcacgcgcgcgccgacgagcacaucgcccuccgggugcgcgagaagcuggaggcccugggggugcccgacggcgcgaccuucugcgaggacuuccagguccccggccgcggggagcucagcugccugcaggacgccaucgaccacuccgccuucaucauccugcugcucacgagcaacuucgacugccggcugucccugcaccaggugaaccaggccaugaugagcaaccucacccggcagggcucccccgacugcgugauccccuuccugccccuggagagcucccccgcccagcucagcuccgacaccgcgagccugcugagcgggcucguccgccuggacgagcacucccagaucuucgcccgcaagguggccaacaccuucaagccccaccggcugcaggcccgcaaggccauguggcggaaggagcaggacacgcgcgcgcuccgggagcagagccagcaccuggacggcgagcgcaugcaggccgccgcccugaacgccgcguacuccgccuaccuccagagcuaccuguccuaccaggcccagauggagcagcuccagguggccuucgggagccacauguccuucggcaccggcgcgcccuacggggcccggaugcccuucggcgggcaggucccccugggcgcgcccccgcccuuccccaccuggcccgggugcccccagccgccgccccugcacgccuggcaggccggcacgccgcccccgcccagcccccagcccgccgccuucccccagucccugcccuucccccagagccccgccuuccccaccgccucccccgccccgccccagagccccggccuccagccccugaucauccaccacgcgcagauggugcagcuggggcucaacaaccacauguggaaccagcgcggcucccaggcccccgaggacaagacccaggaggccgaguga

SEQ ID NO: 9413 - RNA, 2139 nt, Artificial Sequence
  derived and/or modified sequence opt2 from TICAM1__Homo_sapiens__AAI36557
auggccugcaccggccccucccuccccuccgccuucgacauccucggcgccgccggccaggacaagcuccucuaccucaagcacaagcucaagaccccccgccccggcugccagggccaggaccuccuccacgccaugguccuccucaagcucggccaggagaccgaggcccgcaucucccucgaggcccucaaggccgacgccgucgcccgccucgucgcccgccagugggccggcgucgacuccaccgaggaccccgaggagccccccgacgucuccugggccgucgcccgccucuaccaccuccucgccgaggagaagcucugccccgccucccuccgcgacgucgccuaccaggaggccguccgcacccucuccucccgcgacgaccaccgccucggcgagcuccaggacgaggcccgcaaccgcugcggcugggacaucgccggcgaccccggcuccauccgcacccuccaguccaaccucggcugccucccccccuccuccgcccuccccuccggcacccgcucccucccccgccccaucgacggcgucuccgacuggucccagggcugcucccuccgcuccaccggcucccccgccucccucgccuccaaccucgagaucucccagucccccaccaugcccuuccucucccuccaccgcuccccccacggccccuccaagcucugcgacgacccccaggccucccucguccccgagcccguccccggcggcugccaggagcccgaggagauguccuggccccccuccggcgagaucgccuccccccccgagcuccccuccucccccccccccggccuccccgaggucgcccccgacgccaccuccaccggccuccccgacacccccgccgcccccgagaccuccaccaacuaccccgucgagugcaccgagggcuccgccggcccccagucccucccccuccccauccucgagcccgucaagaaccccugcuccgucaaggaccagaccccccuccagcucuccgucgaggacaccaccucccccaacaccaagcccugcccccccacccccaccacccccgagaccuccccccccccccccccccccccccccuccuccacccccugcuccgcccaccucacccccuccucccucuuccccuccucccucgaguccuccuccgagcagaaguucuacaacuucgucauccuccacgcccgcgccgacgagcacaucgcccuccgcguccgcgagaagcucgaggcccucggcguccccgacggcgccaccuucugcgaggacuuccagguccccggccgcggcgagcucuccugccuccaggacgccaucgaccacuccgccuucaucauccuccuccucaccuccaacuucgacugccgccucucccuccaccaggucaaccaggccaugauguccaaccucacccgccagggcucccccgacugcgucauccccuuccucccccucgaguccucccccgcccagcucuccuccgacaccgccucccuccucuccggccucguccgccucgacgagcacucccagaucuucgcccgcaaggucgccaacaccuucaagccccaccgccuccaggcccgcaaggccauguggcgcaaggagcaggacacccgcgcccuccgcgagcagucccagcaccucgacggcgagcgcaugcaggccgccgcccucaacgccgccuacuccgccuaccuccaguccuaccucuccuaccaggcccagauggagcagcuccaggucgccuucggcucccacauguccuucggcaccggcgcccccuacggcgcccgcaugcccuucggcggccaggucccccucggcgcccccccccccuuccccaccuggcccggcugcccccagccccccccccuccacgccuggcaggccggcaccccccccccccccuccccccagcccgccgccuucccccagucccuccccuucccccagucccccgccuuccccaccgccucccccgcccccccccagucccccggccuccagccccucaucauccaccacgcccagaugguccagcucggccucaacaaccacauguggaaccagcgcggcucccaggcccccgaggacaagacccaggaggccgaguga

SEQ ID NO: 9414 - RNA, 2139 nt, Artificial Sequence
  derived and/or modified sequence opt3 from TICAM1__Homo_sapiens__AAI36557
auggccugcaccggccccagccugccuuccgcuuucgacauccucggggcagccggacaggauaagcugcuguacuugaaacacaaguuaaaaacaccaagaccggguugucaaggccaggaccugcuacaugcgauggugcuccugaaacuugggcaggagacugaagcuaggauuucucuggaggccuugaaggcagaugccgucgcucggcucguugcacgccagugggccggaguggacucaacggaagaucccgaggaaccuccagacguaaguugggcuguggcccgacuguaucaccuucucgcggaggagaaguuaugccccgcaagccugcgugaugucgccuaccaagaagcugugagaacccuuuccucuagggacgaucaucgguugggcgagcugcaggacgaagcccgcaacagaugugguugggauauagcaggggacccuggaucgaucaggacacuacagucaaaucucggcugccugccacccagcagugcccuuccuuccggcacucggucucugccacgcccgauugaugggguuagcgacuggucccagggauguucauugcgaaguaccgguagccccgcuucucucgcguccaaccuggagaucucacaaagcccuacaaugccauuuuuaagucugcacagaucuccccauggcccuuccaagcucugcgacgauccacaggccagccuugugcccgagccggucccugggggaugucaggaacccgaggaaaugucguggccaccuucuggcgagauugcauccccuccagaacugcccucaaguccuccaccggguuugcccgagguggcuccugacgccaccagcacugggcuaccagauacacccgcugccccugagaccuccacgaauuauccaguagaaugcacugagggaucugcaggcccccagagccugccgcucccuauccuggaaccaguuaaaaaccccuguucagugaaggaccaaaccccucuucagcugagugucgaggauacaacuucccccaauaccaaaccaugcccucccacaccaaccacgccggaaacuagcccucccccacccccuccacccccuucuucaacaccguguagugcccacuugaccccaagcucccucuuccccucuucgcuggagagcuccucagagcagaaguuuuacaacuucgugauauuacacgcuagggcggacgaacauaucgcacugcgggugcgugagaaacuagaagcccucggcgucccugauggggcuacuuuuugcgaggacuuccaaguuccaggacgcggugaacugaguugccuucaggaugccauugaccacucugcauuuaucauuuugcugcucacaagcaauuucgauuguagacugucccuucaucaggugaaccaggccaugaugucaaaucugaccaggcaaggcagccccgacugcguaauccccuuuuugccgcucgagucuucccccgcucagcugaguagcgacacggccucuuuacuguccgggcuagugcggcucgaugagcacucacagauauucgcacgaaaggucgcgaacaccuuuaagccacaccgccugcaggcuagaaaagccauguggaggaaggaacaagacacacgggcacuucgcgagcagagucagcauuuggauggagaaagaaugcaggccgcugcccugaaugcagcuuauagcgccuaccuccaaucguaucuguccuaccaggcgcagauggagcaguuacaaguggccuucggcucucacaugagcuuugguacuggggcuccuuacggcgcaaggaugcccuucggaggccagguuccacugggggccccucccccauucccgaccuggccuggauguccccagccacccccucuucaugcuuggcaagccgguacaccacccccuccgucaccacagcccgcagcguuuccucagaguuugcccuucccacaguccccugccuuucccacugcuucuccagccccuccgcaaagccccggccuccagccacugauuauccaccaugcacagauggugcagcuagggcugaacaaucacauguggaaccaacguggaucccaggcuccugaggacaaaacccaggaagccgaguga

SEQ ID NO: 9415 - RNA, 2139 nt, Artificial Sequence
  derived and/or modified sequence opt4 from TICAM1__Homo_sapiens__AAI36557
auggccugcaccggccccagccugcccagcgccuucgacauccugggcgccgccggccaggacaagcugcuguaccugaagcacaagcugaagacccccagacccggcugccagggccaggaccugcugcacgccauggugcugcugaagcugggccaggagaccgaggccagaaucagccuggaggcccugaaggccgacgccguggccagacugguggccagacagugggccggcguggacagcaccgaggaccccgaggagccccccgacgugagcugggccguggccagacuguaccaccugcuggccgaggagaagcugugccccgccagccugagagacguggccuaccaggaggccgugagaacccugagcagcagagacgaccacagacugggcgagcugcaggacgaggccagaaacagaugcggcugggacaucgccggcgaccccggcagcaucagaacccugcagagcaaccugggcugccugccccccagcagcgcccugcccagcggcaccagaagccugcccagacccaucgacggcgugagcgacuggagccagggcugcagccugagaagcaccggcagccccgccagccuggccagcaaccuggagaucagccagagccccaccaugcccuuccugagccugcacagaagcccccacggccccagcaagcugugcgacgacccccaggccagccuggugcccgagcccgugcccggcggcugccaggagcccgaggagaugagcuggccccccagcggcgagaucgccagcccccccgagcugcccagcagccccccccccggccugcccgagguggcccccgacgccaccagcaccggccugcccgacacccccgccgcccccgagaccagcaccaacuaccccguggagugcaccgagggcagcgccggcccccagagccugccccugcccauccuggagcccgugaagaaccccugcagcgugaaggaccagaccccccugcagcugagcguggaggacaccaccagccccaacaccaagcccugcccccccacccccaccacccccgagaccagcccccccccccccccccccccccccagcagcacccccugcagcgcccaccugacccccagcagccuguuccccagcagccuggagagcagcagcgagcagaaguucuacaacuucgugauccugcacgccagagccgacgagcacaucgcccugagagugagagagaagcuggaggcccugggcgugcccgacggcgccaccuucugcgaggacuuccaggugcccggcagaggcgagcugagcugccugcaggacgccaucgaccacagcgccuucaucauccugcugcugaccagcaacuucgacugcagacugagccugcaccaggugaaccaggccaugaugagcaaccugaccagacagggcagccccgacugcgugauccccuuccugccccuggagagcagccccgcccagcugagcagcgacaccgccagccugcugagcggccuggugagacuggacgagcacagccagaucuucgccagaaagguggccaacaccuucaagccccacagacugcaggccagaaaggccauguggagaaaggagcaggacaccagagcccugagagagcagagccagcaccuggacggcgagagaaugcaggccgccgcccugaacgccgccuacagcgccuaccugcagagcuaccugagcuaccaggcccagauggagcagcugcagguggccuucggcagccacaugagcuucggcaccggcgcccccuacggcgccagaaugcccuucggcggccaggugccccugggcgcccccccccccuuccccaccuggcccggcugcccccagccccccccccugcacgccuggcaggccggcaccccccccccccccagcccccagcccgccgccuucccccagagccugcccuucccccagagccccgccuuccccaccgccagccccgcccccccccagagccccggccugcagccccugaucauccaccacgcccagauggugcagcugggccugaacaaccacauguggaaccagagaggcagccaggcccccgaggacaagacccaggaggccgaguga

SEQ ID NO: 9416 - RNA, 2139 nt, Artificial Sequence
  derived and/or modified sequence opt5 from TICAM1__Homo_sapiens__AAI36557
auggccugcaccggccccagccugccuuccgcuuucgacauccucggggccgcgggacaggauaagcugcuuuaccugaaacacaagcucaaaacaccgagacccggcugucaagggcaggaccugcuucaugcuauggugcugcucaagcugggacaggagacggaagcccggauuucucuggaggcccucaaagcugaugccgucgcucgccugguugccagacagugggcgggcguggacagcaccgaagauccugaggaacccccugacguguccugggccgucgcucggcuuuaucaucugcucgccgaggagaagcugugccccgcuucucuucgcgauguggccuaccaagaagcgguuagaacacugagcucccgggacgaucaccgccucggggagcugcaggacgaagccagaaaccgguguggaugggauaucgcuggcgacccuggcucuauucgcacccugcagagcaaucucgggugccugccgcccuccagcgcccuuccuucuggaacaagaucccugccccggccuaucgauggcgugagcgacuggucucagggguguucccuccgcagcaccggaucucccgcuucccuggccagcaaccuugagauuucccaaucuccgacaaugccuuuucugagccuccacagauccccgcauggcccuagcaagcugugcgacgauccccaggccucucugguccccgagccugugcccgggggaugucaggaacccgaggaaauguccuggccucccagcggcgagaucgcuucuccucccgaacucccgagcuccccucccccuggccugcccgagguugcgccugacgccaccucuacggggcuucccgauaccccggcugccccugagacaagcaccaauuaucccguggaaugcacagagggauccgccggcccccagagccugccucucccgauccuggaacccgucaaaaacccuuguucugugaaggaccaaacgccccuucagcuguccguggaggauaccacaagcccuaauaccaaacccugcccucccacaccgaccaccccugaaacaucucccccucccccgccucccccucccuccagcacgcccuguuccgcucaccucaccccuucuagccuguucccguccucucuggagagcuccagcgagcagaaguuuuacaacuucgucauucuccacgcccgggcggacgaacauaucgcucugcgcguuagagagaaacuugaagcccugggggugcccgauggagccacauuuugcgaggacuuccaagugccuggcagaggggaacucucuugccugcaggaugcuauugaccacuccgccuuuaucauucugcuucucaccagcaauuucgauugucggcugucucugcaucaggucaaccaggcuaugauguccaaucucacacgccaaggaagccccgacugcgugaucccuuuucugccccuugagucuagcccugcccagcuguccagcgacaccgcgucucuccuguccggccugguucggcuugaugagcacagccagauuuucgccagaaagguggcuaacacguuuaagccgcaccgccuccaggcccggaaagcuauguggagaaaggaacaagacacacgcgcccugcgggagcagucccagcaucuggauggcgaaagaaugcaggcggccgcucucaaugccgcuuauucugccuaccugcaaagcuaucuuuccuaccaggcccagauggagcagcugcaagucgcuuucgggucucacaugagcuuuggaaccggcgcgcccuacggggcccgcaugccuuucggaggccaggugccccucggggcuccucccccguucccuaccuggcccggcuguccccagccucccccucugcaugccuggcaagccggaacaccgcccccucccuccccucagcccgcugccuuuccgcagucucugccuuucccccagagcccugcguuucccaccgcuuccccugcucccccgcaaagcccuggccuucagccccucaucauccaccaugcccagaugguucagcuggggcugaacaaucacauguggaaccaacggggaucucaggcccccgaggacaaaacacaggaagccgaguga

SEQ ID NO: 9417 - protein, 235 aa, Artificial Sequence
  TICAM2__Homo_sapiens__Q86XR7
MGIGKSKINSCPLSLSWGKRHSVDTSPGYHESDSKKSEDLSLCNVAEHSNTTEGPTGKQEGAQSVEEMFEEEAEEEVFLKFVILHAEDDTDEALRVQNLLQDDFGIKPGIIFAEMPCGRQHLQNLDDAVNGSAWTILLLTENFLRDTWCNFQFYTSLMNSVNRQHKYNSVIPMRPLNNPLPRERTPFALQTINALEEESRGFPTQVERIFQESVYKTQQTIWKETRNMVQRQFIA

SEQ ID NO: 9418 - RNA, 708 nt, Artificial Sequence
  TICAM2__Homo_sapiens__AAI09266
auggguaucgggaagucuaaaauaaauuccugcccucuuucucucucuugggguaaaaggcacaguguggauacaaguccaggauaucaugagucagauuccaagaagucugaagaucuauccuuguguaauguugcugagcacagcaauacaacagaggggccaacaggaaagcaggagggagcucagagcguggaagagauguuugaagaagaagcugaagaagagguguuccucaaauuugugauauugcaugcagaagaugacacagaugaagcccucagaguccagaaucugcuacaagaugacuuugguaucaaacccggaauaaucuuugcugagaugccauguggcagacagcauuuacagaauuuagaugaugcuguaaaugggucugcauggacaaucuuauuacugacugaaaacuuuuuaagagauacuugguguaauuuccaguucuauacgucccuaaugaacuccguuaacaggcagcauaaauacaacucuguuauacccaugcggccccugaacaauccccuuccccgagaaaggacucccuuugcccuccaaaccaucaaugccuuagaggaagaaagucguggauuuccuacacaaguagaaagaauuuuucaggagucuguguauaagacacaacaaacuauauggaaagagacaagaaauaugguacaaagacaauuuauugccuga

SEQ ID NO: 9419 - RNA, 708 nt, Artificial Sequence
  derived and/or modified sequence opt1 from TICAM2__Homo_sapiens__AAI09266
augggcaucggcaagagcaagaucaacuccugcccccugagccucuccugggggaagcgccacagcguggacaccuccccgggguaccacgagagcgacuccaagaaguccgaggaccugagccugugcaacgucgccgagcacagcaacaccacggagggccccaccgggaagcaggagggcgcccaguccguggaggagauguucgaggaggaggcggaggaggagguguuccucaaguucgucauccugcacgccgaggacgacaccgacgaggcccugcgggugcagaaccuccugcaggacgacuucggcaucaagcccgggaucaucuucgccgagaugcccugcggccgccagcaccuccagaaccuggacgacgccgugaacgggagcgcguggaccauccugcugcucacggagaacuuccugcgggacaccuggugcaacuuccaguucuacaccucccugaugaacagcgucaaccgccagcacaaguacaacuccgugaucccgaugcggccccucaacaacccccugccccgcgagcggaccccguucgcccugcagacgaucaacgcccucgaggaggagagccgcggcuuccccacccagguggagcggaucuuccaggaguccgucuacaagacccagcagaccaucuggaaggagacgcgcaacauggugcagcggcaguucaucgccuga

SEQ ID NO: 9420 - RNA, 708 nt, Artificial Sequence
  derived and/or modified sequence opt2 from TICAM2__Homo_sapiens__AAI09266
augggcaucggcaaguccaagaucaacuccugcccccucucccucuccuggggcaagcgccacuccgucgacaccucccccggcuaccacgaguccgacuccaagaaguccgaggaccucucccucugcaacgucgccgagcacuccaacaccaccgagggccccaccggcaagcaggagggcgcccaguccgucgaggagauguucgaggaggaggccgaggaggaggucuuccucaaguucgucauccuccacgccgaggacgacaccgacgaggcccuccgcguccagaaccuccuccaggacgacuucggcaucaagcccggcaucaucuucgccgagaugcccugcggccgccagcaccuccagaaccucgacgacgccgucaacggcuccgccuggaccauccuccuccucaccgagaacuuccuccgcgacaccuggugcaacuuccaguucuacaccucccucaugaacuccgucaaccgccagcacaaguacaacuccgucauccccaugcgcccccucaacaacccccucccccgcgagcgcacccccuucgcccuccagaccaucaacgcccucgaggaggagucccgcggcuuccccacccaggucgagcgcaucuuccaggaguccgucuacaagacccagcagaccaucuggaaggagacccgcaacaugguccagcgccaguucaucgccuga

SEQ ID NO: 9421 - RNA, 708 nt, Artificial Sequence
  derived and/or modified sequence opt3 from TICAM2__Homo_sapiens__AAI09266
augggcaucggaaagagcaaaauuaacuccugcccccugucucucucaugggggaagagacacaguguggacaccagcccugguuaccaugaguccgauucuaaaaagucggaagaccuuucacuguguaaugucgccgagcacagcaacacaacugaaggcccaacggggaaacaggagggagcucaaaguguugaagagauguucgaggaagaggcagaagaggagguguuuuugaaguucguaauauuacaugccgaagaugacaccgaugaggcgcugagggugcagaaucuacuccaggacgauuuuggcaucaagccggguauuaucuucgcugaaaugcccugcgggcggcagcaucugcaaaaccuugacgaugccgucaauggauccgcauggacaauucuguugcucacugagaacuuucugcgcgacaccugguguaauuuccaguuuuauacaucucugaugaacagcgugaaucgacagcacaaauacaacuccguuaucccuaugcguccacucaauaaccccuuaccuagagaaaggaccccauucgcccugcagacuauaaaugcucuugaggaggaaucacggggcuuucccacacaaguggagcgcaucuuccaggaaagugucuauaagacccagcagacgauuuggaaagagacuagaaacauggugcaaaggcaguuuaucgcauga

SEQ ID NO: 9422 - RNA, 708 nt, Artificial Sequence
  derived and/or modified sequence opt4 from TICAM2__Homo_sapiens__AAI09266
augggcaucggcaagagcaagaucaacagcugcccccugagccugagcuggggcaagagacacagcguggacaccagccccggcuaccacgagagcgacagcaagaagagcgaggaccugagccugugcaacguggccgagcacagcaacaccaccgagggccccaccggcaagcaggagggcgcccagagcguggaggagauguucgaggaggaggccgaggaggagguguuccugaaguucgugauccugcacgccgaggacgacaccgacgaggcccugagagugcagaaccugcugcaggacgacuucggcaucaagcccggcaucaucuucgccgagaugcccugcggcagacagcaccugcagaaccuggacgacgccgugaacggcagcgccuggaccauccugcugcugaccgagaacuuccugagagacaccuggugcaacuuccaguucuacaccagccugaugaacagcgugaacagacagcacaaguacaacagcgugauccccaugagaccccugaacaacccccugcccagagagagaacccccuucgcccugcagaccaucaacgcccuggaggaggagagcagaggcuuccccacccagguggagagaaucuuccaggagagcguguacaagacccagcagaccaucuggaaggagaccagaaacauggugcagagacaguucaucgccuga

SEQ ID NO: 9423 - RNA, 708 nt, Artificial Sequence
  derived and/or modified sequence opt5 from TICAM2__Homo_sapiens__AAI09266
augggcaucggaaagagcaaaauuaacuccugcccccugucucucagcugggggaagagacacuccguggacaccucuccuggcuaccaugagagcgauuccaaaaagucugaagaccugagccuuuguaaugucgccgagcacuccaacacaacggaagggccgaccggaaaacaggagggcgcucaaagcguugaagagauguucgaggaagaggccgaagaggagguguuucugaaguucgugauccuccaugcggaagaugacacagaugaggcucugcggguccagaaucuucugcaggacgauuuugggauuaagcccggaaucauuuucgccgaaaugccuugcggccgccagcaccuccaaaaccuggacgaugccgugaauggcucugcuuggaccauccugcuccugacagagaacuuucuuagagacaccugguguaauuuccaguuuuauacaucccugaugaacagcguuaaucggcagcauaaauacaacucugugauccccaugcgcccucucaauaacccccugccuagagaacggaccccguucgcccuucagacgauuaaugcucuggaggaggaaucccgcggguuucccacccaagucgagagaaucuuccaggaaagcguguauaagacacagcagaccauuuggaaagagacacggaacaugguucaacgccaguuuaucgccuga

SEQ ID NO: 9424 - protein, 221 aa, Artificial Sequence
  TIRAP__Homo_sapiens__A0A024R3M4
MASSTSLPAPGSRPKKPLGKMADWFRQTLLKKPKKRPNSPESTSSDASQPTSQDSPLPPSLSSVTSPSLPPTHASDSGSSRWSKDYDVCVCHSEEDLVAAQDLVSYLEGSTASLRCFLQLRDATPGGAIVSELCQALSSSHCRVLLITPGFLQDPWCKYQMLQALTEAPGAEGCTIPLLSGLSRAAYPPELRFMYYVDGRGPDGGFRQVKEAVMRYLQTLS

SEQ ID NO: 9425 - RNA, 666 nt, Artificial Sequence
  TIRAP__Homo_sapiens__EAW67688
auggcaucaucgaccucccucccagcuccuggcucucggccuaagaagccucuaggcaagauggcugacugguucaggcagacccugcugaagaagcccaagaagaggcccaacuccccagaaagcaccuccagcgaugcuucacagccuaccucacaggacagcccacuacccccaagccucagcucagucacgucucccagccugccacccacacaugcgagugacaguggcaguagucgcuggagcaaagacuaugacgucugcgugugccacagugaggaagaccugguggccgcccaggaccuggucuccuacuuggaaggcagcacugccagccugcgcugcuuccugcaacuccgggaugcaaccccaggcggcgcuauaguguccgagcugugccaggcacugagcaguagucacugccgggugcugcucaucacgccgggcuuccuucaggaccccuggugcaaguaccagaugcugcaggcccugaccgaggcuccaggggccgagggcugcaccaucccccugcugucgggccucagcagagcugccuacccaccugagcuccgauucauguacuacgucgauggcaggggcccugaugguggcuuucgucaagucaaagaagcugucaugcguuaucugcagacacucaguuga

SEQ ID NO: 9426 - RNA, 666 nt, Artificial Sequence
  derived and/or modified sequence opt1 from TIRAP__Homo_sapiens__EAW67688
auggccagcuccaccagccugcccgccccgggcucccgccccaagaagccccucgggaagauggcggacugguuccggcagacccugcugaagaagcccaagaagcgcccgaacagccccgaguccacgagcuccgacgccagccagcccaccucccaggacagcccccucccgcccucccugagcuccgugaccagccccucccugcccccgacccacgccagcgacuccggcagcucccgguggagcaaggacuacgacgucugcgugugccacagcgaggaggaccucguggccgcccaggaccuggucuccuaccuggaggggagcacggcgucccuccgcugcuuccugcagcugcgggacgccacccccggcggggccaucgugagcgagcucugccaggcccuguccagcucccacugccgcgugcugcucaucacccccggcuuccugcaggaccccuggugcaaguaccagaugcugcaggcgcucaccgaggccccgggcgccgaggggugcacgaucccccugcugagcggccucucccgggccgccuacccgcccgagcugcgcuucauguacuacgucgacgggcggggccccgacgggggcuuccgccaggugaaggaggcggugaugcgguaccugcagacccucagcuga

SEQ ID NO: 9427 - RNA, 666 nt, Artificial Sequence
  derived and/or modified sequence opt2 from TIRAP__Homo_sapiens__EAW67688
auggccuccuccaccucccuccccgcccccggcucccgccccaagaagccccucggcaagauggccgacugguuccgccagacccuccucaagaagcccaagaagcgccccaacucccccgaguccaccuccuccgacgccucccagcccaccucccaggacuccccccucccccccucccucuccuccgucaccucccccucccucccccccacccacgccuccgacuccggcuccucccgcugguccaaggacuacgacgucugcgucugccacuccgaggaggaccucgucgccgcccaggaccucgucuccuaccucgagggcuccaccgccucccuccgcugcuuccuccagcuccgcgacgccacccccggcggcgccaucgucuccgagcucugccaggcccucuccuccucccacugccgcguccuccucaucacccccggcuuccuccaggaccccuggugcaaguaccagaugcuccaggcccucaccgaggcccccggcgccgagggcugcaccaucccccuccucuccggccucucccgcgccgccuacccccccgagcuccgcuucauguacuacgucgacggccgcggccccgacggcggcuuccgccaggucaaggaggccgucaugcgcuaccuccagacccucuccuga

SEQ ID NO: 9428 - RNA, 666 nt, Artificial Sequence
  derived and/or modified sequence opt3 from TIRAP__Homo_sapiens__EAW67688
auggccagcuccaccucucugcccgcuccuggcucaagaccaaagaaaccgcucgggaagauggcagacugguucaggcagacacuucugaaaaagcccaaaaagcggccuaacaguccagagagcacuuccucugaugccucgcaacccacgucacaggacagcccuuugccacccaguuuauccucugugaccagcccuucccugccaccgacacacgcgucagauaguggaagcucucgcugguccaaggacuacgaugucugcguuugucauucagaagaggaccuaguggcugcccaggaucucguaagcuaucuggaagguaguacugcaucucuucgaugcuuucugcaguugcgugacgccacccccggcggggcuaucguguccgagcucugucaagcacugagcucgucucacugcagaguccugcucauuacaccuggauucuuacaggauccaugguguaaauaccagaugcugcaggcccuuaccgaagcucccggcgccgaggguugcacuauaccuuugcuguccgggcuaucaagggcggcauauccacccgagcuccgguuuauguacuauguggacggacgcggcccggauggcggguucagacaaguuaaggaagccgugaugagguaccugcagacacuuaguuga

SEQ ID NO: 9429 - RNA, 666 nt, Artificial Sequence
  derived and/or modified sequence opt4 from TIRAP__Homo_sapiens__EAW67688
auggccagcagcaccagccugcccgcccccggcagcagacccaagaagccccugggcaagauggccgacugguucagacagacccugcugaagaagcccaagaagagacccaacagccccgagagcaccagcagcgacgccagccagcccaccagccaggacagcccccugccccccagccugagcagcgugaccagccccagccugccccccacccacgccagcgacagcggcagcagcagauggagcaaggacuacgacgugugcgugugccacagcgaggaggaccugguggccgcccaggaccuggugagcuaccuggagggcagcaccgccagccugagaugcuuccugcagcugagagacgccacccccggcggcgccaucgugagcgagcugugccaggcccugagcagcagccacugcagagugcugcugaucacccccggcuuccugcaggaccccuggugcaaguaccagaugcugcaggcccugaccgaggcccccggcgccgagggcugcaccaucccccugcugagcggccugagcagagccgccuacccccccgagcugagauucauguacuacguggacggcagaggccccgacggcggcuucagacaggugaaggaggccgugaugagauaccugcagacccugagcuga

SEQ ID NO: 9430 - RNA, 666 nt, Artificial Sequence
  derived and/or modified sequence opt5 from TIRAP__Homo_sapiens__EAW67688
auggccagcuccaccucucugcccgcuccuggcagcagaccgaagaaaccccucgggaagauggccgacugguuccggcagacacugcuuaaaaagccuaaaaagcgccccaacuccccugagucuacgagcuccgaugcgucucaacccaccagccaggacuccccucugccgcccagccucucuuccgugacaagcccuucucugcccccuacccacgcuuccgauagcggaucuuccagauggagcaaggacuacgaugucugcguuugucauuccgaagaggaccuuguggccgcccaggaucuggugucuuaucucgaaggcagcacagcuucccugcggugcuuucugcagcuccgcgacgccacccccgggggagcuaucgucagcgagcugugucaagcccuuucuuccagccacugcagagugcugcucauuacaccgggcuuccugcaggauccuugguguaaauaccagaugcuucaggcgcugaccgaagcccccggggcugagggaugcacgaucccucuccugucuggccugagccgggccgcuuauccucccgagcuccgcuuuauguacuauguugacggcagagggcccgauggaggcuuccggcaagugaaggaagccgucaugcgcuaccugcagacccuuuccuga

SEQ ID NO: 9431 - protein, 221 aa, Artificial Sequence; identical to SEQ ID NO: 9424
  TIRAP__Homo_sapiens__P58753

SEQ ID NO: 9432 - RNA, 666 nt, Artificial Sequence
  TIRAP__Homo_sapiens__AAL05036
auggcaucaucgaccucccucccagcuccuggcucucggccuaagaagccucuaggcaagauggcugacugguucaggcagacccugcugaagaagcccaagaagaggcccaacuccccagaaagcaccuccagcgaugcuucacagccuaccucacaggacagcccacuacccccaagccucagcucagucacgucucccagccugccacccacacaugcgagugacaguggcaguagucgcuggagcaaagacuaugacgucugcgugugccacagugaggaagaccugguggccgcccaggaccuggucuccuacuuggaaggcagcacugccagccugcgcugcuuccugcaacuccgggaugcaaccccaggcggcgcuauaguguccgagcugugccaggcacugagcaguagucacugccgggugcugcucaucacgccgggcuuccuucaggaccccuggugcaaguaccagaugcugcaggcccugaccgaggcuccaggggccgagggcugcaccaucccccugcugucgggccucagcagagcugcuuacccaccugagcuccgauucauguacuacgucgauggcaggggcccugaugguggcuuucgucaagucaaagaagcugucaugcguuaucugcagacacucaguuga

SEQ ID NO: 9433 - RNA, 666 nt, Artificial Sequence; identical to SEQ ID NO: 9426
  derived and/or modified sequence opt1 from TIRAP__Homo_sapiens__AAL05036

SEQ ID NO: 9434 - RNA, 666 nt, Artificial Sequence; identical to SEQ ID NO: 9427
  derived and/or modified sequence opt2 from TIRAP__Homo_sapiens__AAL05036

SEQ ID NO: 9435 - RNA, 666 nt, Artificial Sequence; identical to SEQ ID NO: 9428
  derived and/or modified sequence opt3 from TIRAP__Homo_sapiens__AAL05036

SEQ ID NO: 9436 - RNA, 666 nt, Artificial Sequence; identical to SEQ ID NO: 9429
  derived and/or modified sequence opt4 from TIRAP__Homo_sapiens__AAL05036

SEQ ID NO: 9437 - RNA, 666 nt, Artificial Sequence; identical to SEQ ID NO: 9430
  derived and/or modified sequence opt5 from TIRAP__Homo_sapiens__AAL05036

SEQ ID NO: 9438 - protein, 811 aa, Artificial Sequence
  TLR10__Homo_sapiens__A0A024R9W4
MRLIRNIYIFCSIVMTAEGDAPELPEERELMTNCSNMSLRKVPADLTPATTTLDLSYNLLFQLQSSDFHSVSKLRVLILCHNRIQQLDLKTFEFNKELRYLDLSNNRLKSVTWYLLAGLRYLDLSFNDFDTMPICEEAGNMSHLEILGLSGAKIQKSDFQKIAHLHLNTVFLGFRTLPHYEEGSLPILNTTKLHIVLPMDTNFWVLLRDGIKTSKILEMTNIDGKSQFVSYEMQRNLSLENAKTSVLLLNKVDLLWDDLFLILQFVWHTSVEHFQIRNVTFGGKAYLDHNSFDYSNTVMRTIKLEHVHFRVFYIQQDKIYLLLTKMDIENLTISNAQMPHMLFPNYPTKFQYLNFANNILTDELFKRTIQLPHLKTLILNGNKLETLSLVSCFANNTPLEHLDLSQNLLQHKNDENCSWPETVVNMNLSYNKLSDSVFRCLPKSIQILDLNNNQIQTVPKETIHLMALRELNIAFNFLTDLPGCSHFSRLSVLNIEMNFILSPSLDFVQSCQEVKTLNAGRNPFRCTCELKNFIQLETYSEVMMVGWSDSYTCEYPLNLRGTRLKDVHLHELSCNTALLIVTIVVIMLVLGLAVAFCCLHFDLPWYLRMLGQCTQTWHRVRKTTQEQLKRNVRFHAFISYSEHDSLWVKNELIPNLEKEDGSILICLYESYFDPGKSISENIVSFIEKSYKSIFVLSPNFVQNEWCHYEFYFAHHNLFHENSDHIILILLEPIPFYCIPTRYHKLKALLEKKAYLEWPKDRRKCGLFWANLRAAINVNVLATREMYELQTFTELNEESRGSTISLMRTDCL

SEQ ID NO: 9439 - RNA, 2436 nt, Artificial Sequence
  TLR10__Homo_sapiens__EAW92898
augagacucaucagaaacauuuacauauuuuguaguauuguuaugacagcagagggugaugcuccagagcugccagaagaaagggaacugaugaccaacugcuccaacaugucucuaagaaagguucccgcagacuugaccccagccacaacgacacuggauuuauccuauaaccuccuuuuucaacuccagaguucagauuuucauucugucuccaaacugagaguuuugauucuaugccauaacagaauucaacagcuggaucucaaaaccuuugaauucaacaaggaguuaagauauuuagauuugucuaauaacagacugaagaguguaacuugguauuuacuggcaggucucagguauuuagaucuuucuuuuaaugacuuugacaccaugccuaucugugaggaagcuggcaacaugucacaccuggaaauccuagguuugaguggggcaaaaauacaaaaaucagauuuccagaaaauugcucaucugcaucuaaauacugucuucuuaggauucagaacucuuccucauuaugaagaagguagccugcccaucuuaaacacaacaaaacugcacauuguuuuaccaauggacacaaauuucuggguucuuuugcgugauggaaucaagacuucaaaaauauuagaaaugacaaauauagauggcaaaagccaauuuguaaguuaugaaaugcaacgaaaucuuaguuuagaaaaugcuaagacaucgguucuauugcuuaauaaaguugauuuacucugggacgaccuuuuccuuaucuuacaauuuguuuggcauacaucaguggaacacuuucagauccgaaaugugacuuuuggugguaaggcuuaucuugaccacaauucauuugacuacucaaauacuguaaugagaacuauaaaauuggagcauguacauuucagaguguuuuacauucaacaggauaaaaucuauuugcuuuugaccaaaauggacauagaaaaccugacaauaucaaaugcacaaaugccacacaugcuuuucccgaauuauccuacgaaauuccaauauuuaaauuuugccaauaauaucuuaacagacgaguuguuuaaaagaacuauccaacugccucacuugaaaacucucauuuugaauggcaauaaacuggagacacuuucuuuaguaaguugcuuugcuaacaacacacccuuggaacacuuggaucugagucaaaaucuauuacaacauaaaaaugaugaaaauugcucauggccagaaacuguggucaauaugaaucugucauacaauaaauugucugauucugucuucaggugcuugcccaaaaguauucaaauacuugaccuaaauaauaaccaaauccaaacuguaccuaaagagacuauucaucugauggccuuacgagaacuaaauauugcauuuaauuuucuaacugaucucccuggaugcagucauuucaguagacuuucaguucugaacauugaaaugaacuucauucucagcccaucucuggauuuuguucagagcugccaggaaguuaaaacucuaaaugcgggaagaaauccauuccgguguaccugugaauuaaaaaauuucauucagcuugaaacauauucagaggucaugaugguuggauggucagauucauacaccugugaauacccuuuaaaccuaaggggaacuagguuaaaagacguucaucuccacgaauuaucuugcaacacagcucuguugauugucaccauugugguuauuaugcuaguucugggguuggcuguggccuucugcugucuccacuuugaucugcccugguaucucaggaugcuaggucaaugcacacaaacauggcacaggguuaggaaaacaacccaagaacaacucaagagaaauguccgauuccacgcauuuauuucauacagugaacaugauucucugugggugaagaaugaauugauccccaaucuagagaaggaagaugguucuaucuugauuugccuuuaugaaagcuacuuugacccuggcaaaagcauuagugaaaauauuguaagcuucauugagaaaagcuauaaguccaucuuuguuuugucucccaacuuuguccagaaugaguggugccauuaugaauucuacuuugcccaccacaaucucuuccaugaaaauucugaucauauaauucuuaucuuacuggaacccauuccauucuauugcauucccaccagguaucauaaacugaaagcucuccuggaaaaaaaagcauacuuggaauggcccaaggauaggcguaaaugugggcuuuucugggcaaaccuucgagcugcuauuaauguuaauguauuagccaccagagaaauguaugaacugcagacauucacagaguuaaaugaagagucucgagguucuacaaucucucugaugagaacagauugucuauaa

SEQ ID NO: 9440 - RNA, 2436 nt, Artificial Sequence
  derived and/or modified sequence opt1 from TLR10__Homo_sapiens__EAW92898
augcgccugauccggaacaucuacaucuucugcagcaucgugaugaccgccgagggcgacgcccccgagcucccggaggagcgcgagcugaugaccaacugcuccaacaugagccugcggaagguccccgcggaccucacgcccgccaccaccacccuggaccuguccuacaaccuccuguuccagcugcagagcuccgacuuccacagcguguccaagcuccgcgugcugauccugugccacaaccggauccagcagcucgaccugaagacguucgaguucaacaaggagcugcgcuaccucgaccugagcaacaaccggcugaaguccgucaccugguaccuccuggccgggcugcgcuaccucgaccugagcuucaacgacuucgacaccaugcccaucugcgaggaggccggcaacaugucccaccuggagauccucgggcugagcggcgccaagauccagaaguccgacuuccagaagaucgcgcaccuccaccucaacaccguguuccugggguuccggacgcugccgcacuacgaggagggcagccuccccauccugaacaccaccaagcugcacaucgugcuccccauggacaccaacuucuggguccugcugcgcgacggcaucaagacguccaagauccucgagaugaccaacaucgacgggaagucccaguucgugagcuacgagaugcagcggaaccugagccuggagaacgccaagaccuccgugcuccugcugaacaaggucgaccuccugugggacgaccuguuccucauccugcaguucguguggcacaccagcguggagcacuuccagauccgcaacgucacguucggcgggaaggccuaccuggaccacaacagcuucgacuacuccaacaccgugaugcggaccaucaagcucgagcacgugcacuuccgcgucuucuacauccagcaggacaagaucuaccugcugcugaccaagauggacaucgagaaccucacgaucagcaacgcccagaugccccacaugcuguucccgaacuaccccaccaaguuccaguaccugaacuucgcgaacaacauccucaccgacgagcuguucaagcggaccauccagcugccccaccucaagacgcugauccugaacggcaacaagcucgagacccugucccuggugagcugcuucgccaacaacacgccccucgagcaccuggaccugucccagaaccuccugcagcacaagaacgacgagaacugcagcuggccggagaccguggucaacaugaaccuguccuacaacaagcucagcgacuccguguuccgcugccugcccaagagcauccagauccuggaccucaacaacaaccagauccagaccgugcccaaggagaccauccaccugauggcccugcgggagcucaacaucgccuucaacuuccugaccgaccugcccgggugcucccacuucagccgccucuccguccugaacaucgagaugaacuucauccugagcccgucccucgacuucgugcagagcugccaggaggugaagacccugaacgccggccggaaccccuuccgcugcacgugcgagcugaagaacuucauccagcucgagaccuacuccgaggucaugauggugggcuggagcgacuccuacacgugcgaguacccccugaaccugcgggggacccgccucaaggacguccaccuccacgagcugagcugcaacaccgcgcugcugaucgugaccaucguggucaucaugcuggugcucggccuggccguggccuucugcugccugcacuucgaccuccccugguaccugcgcaugcuggggcagugcacccagaccuggcaccggguccgcaagaccacgcaggagcagcucaagcggaacgugcgcuuccacgccuucaucagcuacuccgagcacgacagccugugggugaagaacgagcugaucccgaaccucgagaaggaggacggcuccauccugaucugccuguacgagagcuacuucgaccccggcaaguccaucagcgagaacaucgucuccuucaucgagaaguccuacaagagcaucuucgugcucagccccaacuucgugcagaacgaguggugccacuacgaguucuacuucgcccaccacaaccuguuccacgagaacuccgaccacaucauccugauccuccuggagcccaucccguucuacugcauccccacccgguaccacaagcugaaggcgcuccuggagaagaaggccuaccuggaguggcccaaggaccgccggaagugcgggcuguucugggccaaccugcgcgccgccaucaacgucaacgugcuggcgacccgggagauguacgagcuccagaccuucacggagcugaacgaggagagccgcggcuccaccaucagccugaugcggaccgacugccucuga

SEQ ID NO: 9441 - RNA, 2436 nt, Artificial Sequence
  derived and/or modified sequence opt2 from TLR10__Homo_sapiens__EAW92898
augcgccucauccgcaacaucuacaucuucugcuccaucgucaugaccgccgagggcgacgcccccgagcuccccgaggagcgcgagcucaugaccaacugcuccaacaugucccuccgcaagguccccgccgaccucacccccgccaccaccacccucgaccucuccuacaaccuccucuuccagcuccaguccuccgacuuccacuccgucuccaagcuccgcguccucauccucugccacaaccgcauccagcagcucgaccucaagaccuucgaguucaacaaggagcuccgcuaccucgaccucuccaacaaccgccucaaguccgucaccugguaccuccucgccggccuccgcuaccucgaccucuccuucaacgacuucgacaccaugcccaucugcgaggaggccggcaacaugucccaccucgagauccucggccucuccggcgccaagauccagaaguccgacuuccagaagaucgcccaccuccaccucaacaccgucuuccucggcuuccgcacccucccccacuacgaggagggcucccuccccauccucaacaccaccaagcuccacaucguccuccccauggacaccaacuucuggguccuccuccgcgacggcaucaagaccuccaagauccucgagaugaccaacaucgacggcaagucccaguucgucuccuacgagaugcagcgcaaccucucccucgagaacgccaagaccuccguccuccuccucaacaaggucgaccuccucugggacgaccucuuccucauccuccaguucgucuggcacaccuccgucgagcacuuccagauccgcaacgucaccuucggcggcaaggccuaccucgaccacaacuccuucgacuacuccaacaccgucaugcgcaccaucaagcucgagcacguccacuuccgcgucuucuacauccagcaggacaagaucuaccuccuccucaccaagauggacaucgagaaccucaccaucuccaacgcccagaugccccacaugcucuuccccaacuaccccaccaaguuccaguaccucaacuucgccaacaacauccucaccgacgagcucuucaagcgcaccauccagcucccccaccucaagacccucauccucaacggcaacaagcucgagacccucucccucgucuccugcuucgccaacaacaccccccucgagcaccucgaccucucccagaaccuccuccagcacaagaacgacgagaacugcuccuggcccgagaccgucgucaacaugaaccucuccuacaacaagcucuccgacuccgucuuccgcugccuccccaaguccauccagauccucgaccucaacaacaaccagauccagaccguccccaaggagaccauccaccucauggcccuccgcgagcucaacaucgccuucaacuuccucaccgaccuccccggcugcucccacuucucccgccucuccguccucaacaucgagaugaacuucauccucucccccucccucgacuucguccaguccugccaggaggucaagacccucaacgccggccgcaaccccuuccgcugcaccugcgagcucaagaacuucauccagcucgagaccuacuccgaggucaugauggucggcugguccgacuccuacaccugcgaguacccccucaaccuccgcggcacccgccucaaggacguccaccuccacgagcucuccugcaacaccgcccuccucaucgucaccaucgucgucaucaugcucguccucggccucgccgucgccuucugcugccuccacuucgaccuccccugguaccuccgcaugcucggccagugcacccagaccuggcaccgcguccgcaagaccacccaggagcagcucaagcgcaacguccgcuuccacgccuucaucuccuacuccgagcacgacucccucugggucaagaacgagcucauccccaaccucgagaaggaggacggcuccauccucaucugccucuacgaguccuacuucgaccccggcaaguccaucuccgagaacaucgucuccuucaucgagaaguccuacaaguccaucuucguccucucccccaacuucguccagaacgaguggugccacuacgaguucuacuucgcccaccacaaccucuuccacgagaacuccgaccacaucauccucauccuccucgagcccauccccuucuacugcauccccacccgcuaccacaagcucaaggcccuccucgagaagaaggccuaccucgaguggcccaaggaccgccgcaagugcggccucuucugggccaaccuccgcgccgccaucaacgucaacguccucgccacccgcgagauguacgagcuccagaccuucaccgagcucaacgaggagucccgcggcuccaccaucucccucaugcgcaccgacugccucuga

SEQ ID NO: 9442 - RNA, 2436 nt, Artificial Sequence
  derived and/or modified sequence opt3 from TLR10__Homo_sapiens__EAW92898
augagacugaucaggaacauuuacauauucugcagcaucgugaugaccgccgagggcgacgcucccgaacucccugaggaacgggagcuuaugacaaauuguuccaacaugucucugcgcaaggucccagcagauuugacuccggccacgaccacauuagaccugucauauaaucuacucuuucagcugcaaaguagcgauuuccacuccguuucuaaacuucgagugcugauuuugugccauaaccguauccagcagcucgaccugaagacuuuugaguucaauaaagaacugagauaccucgauuuaucgaacaauaggcugaagucaguaaccugguaucuuuuggcggggcugcgguaccuagaccucagcuuuaacgauuucgacacaaugcccauuugugaggaagcuggaaauaugagucaccuggagauccuuggucuguccggcgccaaaauacagaagucugauuuucaaaagaucgcacauuugcaccucaacaccguguuccugggguuucgcacuuuaccucauuaugaagagggaagccugccaauucucaauacaaccaaacuucacaucguccugcccauggacacgaacuucuggguguugcuaagagauggcauuaagacuuccaaaauccuggagaugaccaauauagacgguaagucacaguuuguuaguuacgaaaugcagaggaaccucagccuggagaaugccaaaacaucugugcuucuguugaacaaggucgaucuccugugggacgacuuauuccugauucuacaguuuguguggcacacuuccguagaacauuuccaaauccggaacguuaccuucgggggaaaggcuuaucucgaucacaauucauuugacuacagcaacacagugaugcgcaccauuaaacuggagcauguccacuuccgaguguuuuacauccagcaggauaagaucuaucuuuugcugacgaaaauggacauugaaaaucucacuauaaguaacgcacagaugccucacaugcuguucccaaauuaccccacaaaguuucaauaucuuaacuucgccaauaacauccugaccgaugaguuguuuaaaagaacuauucagcucccucaucugaagacauuaauccugaauggcaacaaacuagagacccucucucugguguccugcuucgcuaauaacacgccacuugaacacuuggaccugagccagaaucuccugcaacauaagaacgaugagaauuguucguggccggaaaccgucguuaacaugaacuuaucuuacaauaagcuguccgacucaguguuuaggugccuucccaaaaguauacagauuuuggaucucaacaauaaccagauccagacaguaccuaaggagacuauccaccugauggcccuacgggaacugaauauugcguucaacuuucucaccgaccugccaggcuguagccauuucucccgucuuucuguguugaauaucgagaugaacuuuauucugagccccucauuagauuucguccaaaguugccaggaggugaaaacacucaaugcagggcgcaacccuuucagauguacuugcgaacugaagaauuuuauacagcuugagaccuauuccgaaguuaugauggugggauggagcgacucuuacacaugugaguauccacugaacuugagggguacccggcucaaagacguccaucugcacgaacuaucaugcaauacugcccugcucaucgugacgauuguaguuaucaugcuggugcuuggcuuggcugucgccuucugcugucugcacuuugauuuacccugguaccuccgaaugcuggggcagugcacacaaaccuggcaccgcgugagaaagacuacccaggagcagcuuaagaggaacguccgguuccaugcauuuaucaguuacagcgagcacgacucccugugggugaaaaaugaacuaauuccgaaccucgagaaggaagauggaucuauacugaucuguuuguaugagucguacuucgacccuggcaaaagcauuuccgagaacaucguuucauuuauugaaaagaguuauaaaucuaucuucgugcugagccccaauuuuguacagaacgaguggugccacuacgaguucuauuuugcucaucacaauuuauuccaugaaaacuccgaucacauaauccucauucugcuugaaccaaucccuuuuuacuguauucccacacgcuaucauaagcugaaggccuugcucgagaaaaaggcguaccuggaguggccaaaagacagaaggaagugcggucuauucugggccaaucugcgugcagcuaucaacgucaaugugcuugccacccgggaaauguacgagcuccaaacuuucacagaacugaacgaggaaucacgagggagcacgauaucuuugaugagaaccgauugucuguga

SEQ ID NO: 9443 - RNA, 2436 nt, Artificial Sequence
  derived and/or modified sequence opt4 from TLR10__Homo_sapiens__EAW92898
augagacugaucagaaacaucuacaucuucugcagcaucgugaugaccgccgagggcgacgcccccgagcugcccgaggagagagagcugaugaccaacugcagcaacaugagccugagaaaggugcccgccgaccugacccccgccaccaccacccuggaccugagcuacaaccugcuguuccagcugcagagcagcgacuuccacagcgugagcaagcugagagugcugauccugugccacaacagaauccagcagcuggaccugaagaccuucgaguucaacaaggagcugagauaccuggaccugagcaacaacagacugaagagcgugaccugguaccugcuggccggccugagauaccuggaccugagcuucaacgacuucgacaccaugcccaucugcgaggaggccggcaacaugagccaccuggagauccugggccugagcggcgccaagauccagaagagcgacuuccagaagaucgcccaccugcaccugaacaccguguuccugggcuucagaacccugccccacuacgaggagggcagccugcccauccugaacaccaccaagcugcacaucgugcugcccauggacaccaacuucugggugcugcugagagacggcaucaagaccagcaagauccuggagaugaccaacaucgacggcaagagccaguucgugagcuacgagaugcagagaaaccugagccuggagaacgccaagaccagcgugcugcugcugaacaagguggaccugcugugggacgaccuguuccugauccugcaguucguguggcacaccagcguggagcacuuccagaucagaaacgugaccuucggcggcaaggccuaccuggaccacaacagcuucgacuacagcaacaccgugaugagaaccaucaagcuggagcacgugcacuucagaguguucuacauccagcaggacaagaucuaccugcugcugaccaagauggacaucgagaaccugaccaucagcaacgcccagaugccccacaugcuguuccccaacuaccccaccaaguuccaguaccugaacuucgccaacaacauccugaccgacgagcuguucaagagaaccauccagcugccccaccugaagacccugauccugaacggcaacaagcuggagacccugagccuggugagcugcuucgccaacaacaccccccuggagcaccuggaccugagccagaaccugcugcagcacaagaacgacgagaacugcagcuggcccgagaccguggugaacaugaaccugagcuacaacaagcugagcgacagcguguucagaugccugcccaagagcauccagauccuggaccugaacaacaaccagauccagaccgugcccaaggagaccauccaccugauggcccugagagagcugaacaucgccuucaacuuccugaccgaccugcccggcugcagccacuucagcagacugagcgugcugaacaucgagaugaacuucauccugagccccagccuggacuucgugcagagcugccaggaggugaagacccugaacgccggcagaaaccccuucagaugcaccugcgagcugaagaacuucauccagcuggagaccuacagcgaggugaugauggugggcuggagcgacagcuacaccugcgaguacccccugaaccugagaggcaccagacugaaggacgugcaccugcacgagcugagcugcaacaccgcccugcugaucgugaccaucguggugaucaugcuggugcugggccuggccguggccuucugcugccugcacuucgaccugcccugguaccugagaaugcugggccagugcacccagaccuggcacagagugagaaagaccacccaggagcagcugaagagaaacgugagauuccacgccuucaucagcuacagcgagcacgacagccugugggugaagaacgagcugauccccaaccuggagaaggaggacggcagcauccugaucugccuguacgagagcuacuucgaccccggcaagagcaucagcgagaacaucgugagcuucaucgagaagagcuacaagagcaucuucgugcugagccccaacuucgugcagaacgaguggugccacuacgaguucuacuucgcccaccacaaccuguuccacgagaacagcgaccacaucauccugauccugcuggagcccauccccuucuacugcauccccaccagauaccacaagcugaaggcccugcuggagaagaaggccuaccuggaguggcccaaggacagaagaaagugcggccuguucugggccaaccugagagccgccaucaacgugaacgugcuggccaccagagagauguacgagcugcagaccuucaccgagcugaacgaggagagcagaggcagcaccaucagccugaugagaaccgacugccuguga

SEQ ID NO: 9444 - RNA, 2436 nt, Artificial Sequence
  derived and/or modified sequence opt5 from TLR10__Homo_sapiens__EAW92898
augagacugauccggaacauuuacaucuucugcagcauugugaugaccgccgagggcgacgcucccgaacucccugaggaacgcgagcugaugacaaauuguuccaacaugucucuuagaaaggucccggccgaucugacgcccgcgaccacaacccucgaccugagcuauaaucuucuguuucagcuccaauccucugauuuccacagcguuuccaaacugcgggugcugauccucugccauaaccgcauucagcagcuggaccuuaagacauuugaguucaauaaagaacugagauaccucgaucugucuaacaaucggcuuaagagcgugaccugguaucugcucgcugggcugcgcuaccuggaccucuccuuuaacgauuucgacacaaugccuaucugugaggaagccggaaauaugagccaccuggagauccuuggccugucuggggccaaaauucagaaguccgauuuucaaaagaucgcucaucuccaccugaacaccgucuuccuuggauuuagaacgcugccccauuaugaagagggcagccucccuauucugaauaccacaaaacugcacaucgugcuccccauggacaccaacuucuggguucugcuucgggaugggauuaagacaucuaaaauccuggagaugaccaauauugacggaaagucccaguuugugagcuacgaaaugcagcgcaaccucucucuggagaaugccaaaacguccguccuucugcucaacaagguggaucugcugugggacgaccucuuccugauccuucaguuuguuuggcacacaagcguggaacauuuccaaaucagaaacgucaccuucggcggcaaggcuuaucuggaucacaauuccuuugacuacucuaacacagugaugcggaccauuaaacucgagcaugugcacuuccgcgucuuuuacauccagcaggauaagauuuaucugcugcuuaccaaaauggacaucgaaaaucucacaauuagcaacgcccagaugccucacaugcuguucccgaauuaccccacgaaguuucaauaucugaacuucgcgaauaacauccucaccgaugagcuguuuaaaagaacaauccagcuuccucaucugaagacccucauucugaaugggaacaaacuggagacacuuucccucguuagcugcuucgccaauaacacgccccuggaacaccuggaccucucucagaaucugcuucaacauaagaacgaugagaauuguuccuggccugaaaccguggugaacaugaaccugagcuacaauaagcucucugacagcgucuuucggugccugcccaaauccauccagauucuggaucuuaacaauaaccagauccagacagugccgaaggagaccauucaccucauggcucugcgcgaacugaauaucgccuucaacuuucucaccgaccugccuggauguucucauuucagcagacuuuccguucugaauaucgagaugaacuuuauucucagccccucucuggauuucgugcaauccugccaggaggucaaaacacugaaugcuggccggaacccuuucagauguaccugcgaacuuaagaauuuuauccagcucgagacauauagcgaagugaugaugguuggguggucugacuccuacacgugugaguauccccugaaccugcgcggaacccggcucaaagacgugcaccuucacgaacuuagcugcaauacagcccugcucauugucaccaucguggucauuaugcuggugcugggccuugcgguugccuucugcugucugcauuuugaucuccccugguaccugagaaugcucgggcagugcacacaaaccuggcaccgcgugcggaagacgacccaggagcagcugaagagaaacguccgcuuccaugcuuuuaucuccuacucugagcacgacagccuuugggugaaaaaugaacugauuccuaaccucgagaaggaagauggauccauccugaucugucuguaugagucuuacuucgacccgggcaaaagcauuuccgagaacaucguuagcuuuauugaaaagucuuauaaauccaucuucgugcuuagccccaauuuuguccagaacgaguggugccacuacgaguucuauuuugcccaucacaaucuguuccaugaaaacucugaucacauuauccucauccugcucgaaccuauucccuuuuacuguaucccuacacgguaucauaagcugaaggcucugcuggagaaaaaggccuaccucgaguggcccaaagacagacgcaagugcggccuguucugggccaaucugcgggcugcgauuaacgugaaugugcuugccaccagagaaauguacgagcugcaaacauucaccgaacucaacgaggaaucccgcgggagcacgaucucucugaugcggacagauugucucuga

SEQ ID NO: 9445 - protein, 811 aa, Artificial Sequence [sequence omitted]

SEQ ID NO: 9446 - RNA, 2436 nt, Artificial Sequence
  TLR10__Homo_sapiens__AAY78477
augagacucaucagaaacauuuacauauuuuguaguauaguuaugacagcagagggugaugcuccagagcugccagaagaaagggaacugaugaccaacugcuccaacaugucucuaagaaagguucccgcagacuugaccccagccacaacgacacuggauuuauccuauaaccuccuuuuucaacuccagaguucagauuuucauucugucuccaaacugagaguuuugauucuaugccauaacagaauucaacagcuggaucucaaaaccuuugaauucaacaaggaguuaagauauuuagauuugucuaauaacagacugaagaguguaacuugguauuuacuggcaggucucagguauuuagaucuuucuuuuaaugacuuugacaccaugccuaucugugaggaagcuggcaacaugucacaccuggaaauccuagguuugaguggggcaaaaauacaaaaaucagauuuccagaaaauugcucaucugcaucuaaauacugucuucuuaggauucagaacucuuccucauuaugaagaagguagccugcccaucuuaaacacaacaaaacugcacauuguuuuaccaauggacacaaauuucuggguucuuuugcgugauggaaucaagacuucaaaaauauuagaaaugacaaauauagauggcaaaagccaauuuguaaguuaugaaaugcaacgaaaucuuaguuuagaacaugcuaagacaucgguucuauugcuuaauaaaguugauuuacucugggacgaccuuuuccuuaucuuacaauuuguuuggcauacaucaguggaacacuuucagauccgaaaugugacuuuuggugguaaggcuuaucuugaccacaauucauuugacuacucaaauacuguaaugagaacuauaaaguuggagcauguacauuucagaguguuuuacauucaacaggauaaaaucuauuugcuuuugaccaaaauggacauagaaaaccugacaauaucaaaugcacaaaugccacacaugcuuuucccgaauuauccuacgaaauuccaauauuuaaauuuugccaauaauaucuuaacagacgaguuguuuaaaagaacucuccaacugccucacuugaaaacucucauuuugaauggcaauaaacuggagacacuuucuuuaguaaguugcuuugcuaacaacacacccuuggaacacuuggaucugagucaaaaucuauuacaacauaaaaaugaugaaaauugcucauggccagaaacuguggucaauaugaaucugucauacaauaaauugucugauucugucuucaggugcuugcccaaaaguauucaaauacuugaccuaaauaauaaccaaauccaaacuguaccuaaagagacuauucaucugauggccuuacgagaacuaaauauugcauuuaauuuucuaacugaucucccuggaugcagucauuucaguagacuuucaguucugaacauugaaaugaacuucauucucagcccaucucuggauuuuguucagagcugccaggaaguuaaaacucuaaaugcgggaagaaauccauuccgguguaccugugaauuaaaaaauuucauucagcuugaaacauauucagaggucaugaugguuggauggucagauucauacaccugugaauacccuuuaaaccuaaggggaacuagguuaaaagacguucaucuccacgaauuaucuugcaacacagcucuguugauugucaccauugugguuauuaugcuaguucugggguuggcuguggccuucugcugucuccacuuugaucugcccugguaucucaggaugcuaggucaaugcacacaaacauggcacaggguuaggaaaacaacccaagaacaacucaagagaaauguccgauuccacgcauuuauuucauacagugaacaugauucucugugggugaagaaugaauugauccccaaucuagagaaggaagaugguucuaucuugauuugccuuuaugaaagcuacuuugacccuggcaaaagcauuagugaaaauauuguaagcuucauugagaaaagcuauaaguccaucuuuguuuugucucccaacuuuguccagaaugaguggugccauuaugaauucuacuuugcccaccacaaucucuuccaugaaaauucugaucauauaauucuuaucuuacuggaacccauuccauucuauugcauucccaccagguaucauaaacugaaagcucuccuggaaaaaaaagcauacuuggaauggcccaaggauaggcguaaaugugggcuuuucugggcaaaccuucgagcugcuauuaauguuaauguauuagccaccagagaaauguaugaacugcagacauucacagaguuaaaugaagagucucgagguucuacaaucucucugaugagaacagauugucuauaa

SEQ ID NO: 9447 - RNA, 2436 nt, Artificial Sequence
  derived and/or modified sequence opt1 from TLR10__Homo_sapiens__AAY78477
augcgccugauccggaacaucuacaucuucugcagcaucgugaugaccgccgagggcgacgcccccgagcucccggaggagcgcgagcugaugaccaacugcuccaacaugagccugcggaagguccccgcggaccucacgcccgccaccaccacccuggaccuguccuacaaccuccuguuccagcugcagagcuccgacuuccacagcguguccaagcuccgcgugcugauccugugccacaaccggauccagcagcucgaccugaagacguucgaguucaacaaggagcugcgcuaccucgaccugagcaacaaccggcugaaguccgucaccugguaccuccuggccgggcugcgcuaccucgaccugagcuucaacgacuucgacaccaugcccaucugcgaggaggccggcaacaugucccaccuggagauccucgggcugagcggcgccaagauccagaaguccgacuuccagaagaucgcgcaccuccaccugaacaccguguuccugggguuccggacgcugccgcacuacgaggagggcagccuccccauccugaacaccaccaagcugcacaucgugcuccccauggacaccaacuucuggguccugcugcgcgacggcaucaagacguccaagauccucgagaugaccaacaucgacgggaagucccaguucgugagcuacgagaugcagcggaaccugagccuggagcacgccaagaccuccgugcuccugcugaacaaggucgaccuccugugggacgaccuguuccucauccugcaguucguguggcacaccagcguggagcacuuccagauccgcaacgucacguucggcgggaaggccuaccuggaccacaacagcuucgacuacuccaacaccgugaugcggaccaucaagcucgagcacgugcacuuccgcgucuucuacauccagcaggacaagaucuaccugcugcugaccaagauggacaucgagaaccucacgaucagcaacgcccagaugccccacaugcuguucccgaacuaccccaccaaguuccaguaccugaacuucgcgaacaacauccucaccgacgagcuguucaagcggacccugcagcucccccaccugaagacgcugauccucaacggcaacaagcuggagacccugucccucgugagcugcuucgccaacaacacgccccuggagcaccuggaccucucccagaaccugcugcagcacaagaacgacgagaacugcagcuggccggagaccguggucaacaugaaccucuccuacaacaagcugagcgacuccguguuccgcugccugcccaagagcauccagauccucgaccugaacaacaaccagauccagaccgugcccaaggagaccauccaccugauggcccuccgggagcugaacaucgccuucaacuuccugaccgaccuccccgggugcucccacuucagccgccuguccguccugaacaucgagaugaacuucauccucagcccgucccuggacuucgugcagagcugccaggaggugaagacccugaacgccggccggaaccccuuccgcugcacgugcgagcucaagaacuucauccagcuggagaccuacuccgaggucaugauggugggcuggagcgacuccuacacgugcgaguacccccugaaccuccgggggacccgccugaaggacguccaccuccacgagcugagcugcaacaccgcgcugcugaucgugaccaucguggucaucaugcucgugcugggccuggccguggccuucugcugccuccacuucgaccugcccugguaccugcgcaugcucgggcagugcacccagaccuggcaccggguccgcaagaccacgcaggagcagcugaagcggaacgugcgcuuccacgccuucaucagcuacuccgagcacgacagccugugggugaagaacgagcucaucccgaaccuggagaaggaggacggcuccauccugaucugccucuacgagagcuacuucgaccccggcaaguccaucagcgagaacaucgucuccuucaucgagaaguccuacaagagcaucuucgugcugagccccaacuucgugcagaacgaguggugccacuacgaguucuacuucgcccaccacaaccuguuccacgagaacuccgaccacaucauccucauccugcuggagcccaucccguucuacugcauccccacccgguaccacaagcucaaggcgcugcuggagaagaaggccuaccucgaguggcccaaggaccgccggaagugcgggcuguucugggccaaccugcgcgccgccaucaacgucaacgugcucgcgacccgggagauguacgagcugcagaccuucacggagcugaacgaggagagccgcggcuccaccaucagccucaugcggaccgacugccuguga

SEQ ID NO: 9448 - RNA, 2436 nt, Artificial Sequence
  derived and/or modified sequence opt2 from TLR10__Homo_sapiens__AAY78477
augcgccucauccgcaacaucuacaucuucugcuccaucgucaugaccgccgagggcgacgcccccgagcuccccgaggagcgcgagcucaugaccaacugcuccaacaugucccuccgcaagguccccgccgaccucacccccgccaccaccacccucgaccucuccuacaaccuccucuuccagcuccaguccuccgacuuccacuccgucuccaagcuccgcguccucauccucugccacaaccgcauccagcagcucgaccucaagaccuucgaguucaacaaggagcuccgcuaccucgaccucuccaacaaccgccucaaguccgucaccugguaccuccucgccggccuccgcuaccucgaccucuccuucaacgacuucgacaccaugcccaucugcgaggaggccggcaacaugucccaccucgagauccucggccucuccggcgccaagauccagaaguccgacuuccagaagaucgcccaccuccaccucaacaccgucuuccucggcuuccgcacccucccccacuacgaggagggcucccuccccauccucaacaccaccaagcuccacaucguccuccccauggacaccaacuucuggguccuccuccgcgacggcaucaagaccuccaagauccucgagaugaccaacaucgacggcaagucccaguucgucuccuacgagaugcagcgcaaccucucccucgagcacgccaagaccuccguccuccuccucaacaaggucgaccuccucugggacgaccucuuccucauccuccaguucgucuggcacaccuccgucgagcacuuccagauccgcaacgucaccuucggcggcaaggccuaccucgaccacaacuccuucgacuacuccaacaccgucaugcgcaccaucaagcucgagcacguccacuuccgcgucuucuacauccagcaggacaagaucuaccuccuccucaccaagauggacaucgagaaccucaccaucuccaacgcccagaugccccacaugcucuuccccaacuaccccaccaaguuccaguaccucaacuucgccaacaacauccucaccgacgagcucuucaagcgcacccuccagcucccccaccucaagacccucauccucaacggcaacaagcucgagacccucucccucgucuccugcuucgccaacaacaccccccucgagcaccucgaccucucccagaaccuccuccagcacaagaacgacgagaacugcuccuggcccgagaccgucgucaacaugaaccucuccuacaacaagcucuccgacuccgucuuccgcugccuccccaaguccauccagauccucgaccucaacaacaaccagauccagaccguccccaaggagaccauccaccucauggcccuccgcgagcucaacaucgccuucaacuuccucaccgaccuccccggcugcucccacuucucccgccucuccguccucaacaucgagaugaacuucauccucucccccucccucgacuucguccaguccugccaggaggucaagacccucaacgccggccgcaaccccuuccgcugcaccugcgagcucaagaacuucauccagcucgagaccuacuccgaggucaugauggucggcugguccgacuccuacaccugcgaguacccccucaaccuccgcggcacccgccucaaggacguccaccuccacgagcucuccugcaacaccgcccuccucaucgucaccaucgucgucaucaugcucguccucggccucgccgucgccuucugcugccuccacuucgaccuccccugguaccuccgcaugcucggccagugcacccagaccuggcaccgcguccgcaagaccacccaggagcagcucaagcgcaacguccgcuuccacgccuucaucuccuacuccgagcacgacucccucugggucaagaacgagcucauccccaaccucgagaaggaggacggcuccauccucaucugccucuacgaguccuacuucgaccccggcaaguccaucuccgagaacaucgucuccuucaucgagaaguccuacaaguccaucuucguccucucccccaacuucguccagaacgaguggugccacuacgaguucuacuucgcccaccacaaccucuuccacgagaacuccgaccacaucauccucauccuccucgagcccauccccuucuacugcauccccacccgcuaccacaagcucaaggcccuccucgagaagaaggccuaccucgaguggcccaaggaccgccgcaagugcggccucuucugggccaaccuccgcgccgccaucaacgucaacguccucgccacccgcgagauguacgagcuccagaccuucaccgagcucaacgaggagucccgcggcuccaccaucucccucaugcgcaccgacugccucuga

SEQ ID NO: 9449 - RNA, 2436 nt, Artificial Sequence
  derived and/or modified sequence opt3 from TLR10__Homo_sapiens__AAY78477
augagacugaucaggaacauuuacauauucugcagcaucgugaugaccgccgagggcgacgcucccgaacucccugaggaacgggagcuuaugacaaauuguuccaacaugucucugcgcaaggucccagcagauuugacuccggccacgaccacauuagaccugucauauaaucuacucuuucagcugcaaaguagcgauuuccacuccguuucuaaacuucgagugcugauuuugugccauaaccguauccagcagcucgaccugaagacuuuugaauuuaauaaagagcugagauaccucgauuuaucgaacaauaggcugaagucaguaaccugguaucuuuuggcggggcugcgguaccuagaccucagcuucaacgauuucgacacaaugcccauuugugaggaagcuggaaauaugagucaccuggagauccuuggucuguccggcgccaaaauacagaagucugauuuucaaaagaucgcacauuugcaccucaacaccguguuccugggguuucgcacuuuaccucauuaugaagagggaagccugccaauucucaauacaaccaaacuucacaucguccugcccauggacacgaacuucuggguguugcuaagagauggcauuaagacuuccaaaauccuggagaugaccaauauagacgguaagucacaguuuguuaguuacgaaaugcagaggaaccucagccuggagcacgccaaaacaucugugcuucuguugaauaaggucgaucuccugugggacgacuuauuccugauucuacaguuuguguggcauacuuccguagaacacuuccaaauccggaacguuaccuucgggggaaaggcuuaucucgaucauaacucauuugacuacagcaauacagugaugcgcaccauuaaacuggagcacguccacuuccgaguguuuuacauccagcaggauaagaucuaucuuuugcugacgaaaauggacauugaaaaccucacuauaaguaaugcacagaugccucauaugcuguucccaaacuaccccacaaaguuucaauaucuuaauuucgccaacaauauccugaccgaugaguuguuuaaaagaacucuccagcugccucacuuaaagacacugauucuaaacggcaauaaacucgagacccugucucuuguguccugcuucgcuaacaauacgccauuggaacaucuggaccucagccagaaccuguuacaacacaagaaugaugagaacuguucguggccggaaaccgucguuaauaugaaccugucuuacaacaaacuuuccgacucaguguuuaggugcuugcccaagaguauccagauacucgaucugaauaacaaucagauucagacaguaccuaaggagacuauccaucuaauggcccugcgggaacucaacaucgcguucaauuuucugaccgaccuuccaggcuguagccacuucucccguuugucugugcugaacauugagaugaauuuuaucuuaagccccucacucgauuucguccaaaguugccaggaggugaaaacacugaacgcagggcgcaauccuuucagauguacuugcgaacuuaagaacuuuauucagcuggagaccuauuccgaaguuaugauggugggauggagcgacucuuacacaugugaguauccauugaaucucagggguacccggcugaaagacguccaccuacaugaacugucaugcaacacugcccuccugauagugacgaucguaguuauuaugcuuguguugggccuggcugucgccuucugcuguuuacacuuugaucuccccugguaccugcgaaugcuugggcagugcacacaaaccuggcaucgcgugagaaagacuacccaggagcagcugaagaggaauguccgguuccacgcauuuaucaguuacagcgagcacgacucccuaugggugaaaaacgaacucaucccgaaucuggagaaggaagauggaucuauuuugauaugucuguaugagucguacuucgacccuggcaaaagcaucuccgagaacauuguuucauuuaucgaaaagaguuauaaaucuauuuucguguuaagccccaacuuuguacagaaugaguggugccauuacgaguucuauuuugcucaccauaaccucuuccacgaaaauuccgaucauaucauacugauccuucuggaaccaauuccuuuuuacuguauccccacacgcuaucacaaguugaaggcccuccuggagaaaaaggcguaccuagaguggccaaaagacagaaggaagugcggucuguucugggccaaccuucgugcagcuauuaaugucaacgugcucgccacccgggaaauguacgagcugcaaacuuucacagaauugaaugaggaaucacgagggagcacgaucucucugaugagaaccgauuguuuauga

SEQ ID NO: 9450 - RNA, 2436 nt, Artificial Sequence
  derived and/or modified sequence opt4 from TLR10__Homo_sapiens__AAY78477
augagacugaucagaaacaucuacaucuucugcagcaucgugaugaccgccgagggcgacgcccccgagcugcccgaggagagagagcugaugaccaacugcagcaacaugagccugagaaaggugcccgccgaccugacccccgccaccaccacccuggaccugagcuacaaccugcuguuccagcugcagagcagcgacuuccacagcgugagcaagcugagagugcugauccugugccacaacagaauccagcagcuggaccugaagaccuucgaguucaacaaggagcugagauaccuggaccugagcaacaacagacugaagagcgugaccugguaccugcuggccggccugagauaccuggaccugagcuucaacgacuucgacaccaugcccaucugcgaggaggccggcaacaugagccaccuggagauccugggccugagcggcgccaagauccagaagagcgacuuccagaagaucgcccaccugcaccugaacaccguguuccugggcuucagaacccugccccacuacgaggagggcagccugcccauccugaacaccaccaagcugcacaucgugcugcccauggacaccaacuucugggugcugcugagagacggcaucaagaccagcaagauccuggagaugaccaacaucgacggcaagagccaguucgugagcuacgagaugcagagaaaccugagccuggagcacgccaagaccagcgugcugcugcugaacaagguggaccugcugugggacgaccuguuccugauccugcaguucguguggcacaccagcguggagcacuuccagaucagaaacgugaccuucggcggcaaggccuaccuggaccacaacagcuucgacuacagcaacaccgugaugagaaccaucaagcuggagcacgugcacuucagaguguucuacauccagcaggacaagaucuaccugcugcugaccaagauggacaucgagaaccugaccaucagcaacgcccagaugccccacaugcuguuccccaacuaccccaccaaguuccaguaccugaacuucgccaacaacauccugaccgacgagcuguucaagagaacccugcagcugccccaccugaagacccugauccugaacggcaacaagcuggagacccugagccuggugagcugcuucgccaacaacaccccccuggagcaccuggaccugagccagaaccugcugcagcacaagaacgacgagaacugcagcuggcccgagaccguggugaacaugaaccugagcuacaacaagcugagcgacagcguguucagaugccugcccaagagcauccagauccuggaccugaacaacaaccagauccagaccgugcccaaggagaccauccaccugauggcccugagagagcugaacaucgccuucaacuuccugaccgaccugcccggcugcagccacuucagcagacugagcgugcugaacaucgagaugaacuucauccugagccccagccuggacuucgugcagagcugccaggaggugaagacccugaacgccggcagaaaccccuucagaugcaccugcgagcugaagaacuucauccagcuggagaccuacagcgaggugaugauggugggcuggagcgacagcuacaccugcgaguacccccugaaccugagaggcaccagacugaaggacgugcaccugcacgagcugagcugcaacaccgcccugcugaucgugaccaucguggugaucaugcuggugcugggccuggccguggccuucugcugccugcacuucgaccugcccugguaccugagaaugcugggccagugcacccagaccuggcacagagugagaaagaccacccaggagcagcugaagagaaacgugagauuccacgccuucaucagcuacagcgagcacgacagccugugggugaagaacgagcugauccccaaccuggagaaggaggacggcagcauccugaucugccuguacgagagcuacuucgaccccggcaagagcaucagcgagaacaucgugagcuucaucgagaagagcuacaagagcaucuucgugcugagccccaacuucgugcagaacgaguggugccacuacgaguucuacuucgcccaccacaaccuguuccacgagaacagcgaccacaucauccugauccugcuggagcccauccccuucuacugcauccccaccagauaccacaagcugaaggcccugcuggagaagaaggccuaccuggaguggcccaaggacagaagaaagugcggccuguucugggccaaccugagagccgccaucaacgugaacgugcuggccaccagagagauguacgagcugcagaccuucaccgagcugaacgaggagagcagaggcagcaccaucagccugaugagaaccgacugccuguga

SEQ ID NO: 9451 - RNA, 2436 nt, Artificial Sequence
  derived and/or modified sequence opt5 from TLR10__Homo_sapiens__AAY78477
augagacugauccggaacauuuacaucuucugcagcauugugaugaccgccgagggcgacgcucccgaacucccugaggaacgcgagcugaugacaaauuguuccaacaugucucuuagaaaggucccggccgaucugacgcccgcgaccacaacccucgaccugagcuauaaucuucuguuucagcuccaauccucugauuuccacagcguuuccaaacugcgggugcugauccucugccauaaccgcauucagcagcuggaccuuaagacauuugaguucaauaaagagcugagauaccucgaucugucuaacaaucggcuuaagagcgugaccugguaucugcucgcugggcugcgcuaccuggaccucuccuuuaacgauuucgacacaaugccuaucugugaggaagccggaaauaugagccaccuggagauccuuggccugucuggggccaaaauucagaaguccgauuuucaaaagaucgcucaucuccaccugaacaccgucuuccuuggauuuagaacgcugccccauuaugaagagggcagccucccuauucugaauaccacaaaacugcacaucgugcuccccauggacaccaacuucuggguucugcuucgggaugggauuaagacaucuaaaauccuggagaugaccaauauugacggaaagucccaguuugugagcuacgaaaugcagcgcaaccucucucuggagcacgccaaaacguccguccuucugcucaauaagguggaucugcugugggacgaccucuuccugauccuucaguuuguuuggcauacaagcguggaacacuuccaaaucagaaacgucaccuucggcggcaaggcuuaucuggaucauaacuccuuugacuacucuaauacagugaugcggaccauuaaacucgagcacgugcacuuccgcgucuuuuacauccagcaggauaagauuuaucugcugcuuaccaaaauggacaucgaaaaccucacaauuagcaaugcccagaugccucauaugcuguucccgaacuaccccacgaaguuucaauaucugaauuucgcgaacaauauccucaccgaugagcuguuuaaaagaacacuucagcugccucaccucaagacccugauccugaacgggaauaaacuugagacacucucccugguuagcugcuucgccaacaauacgccccuggaacaucucgaccugucucagaaccuucugcaacacaagaaugaugagaacuguuccuggccugaaaccguggugaauaugaaccucagcuacaacaagcugucugacagcgucuuucggugccugcccaaauccauucagauccuugaucucaauaacaaucagauucagacagugccgaaggagaccauccaucugauggcucugcgcgaacucaacauugccuucaauuuucugaccgaccuuccuggauguucucacuucagcagacuguccguucucaacaucgagaugaauuuuauccugagccccucucuggauuucgugcaauccugccaggaggucaaaacacuuaacgcuggccggaauccuuucagauguaccugcgaacucaagaacuuuauucagcuggagacauauagcgaagugaugaugguuggguggucugacuccuacacgugugaguauccccugaaucuccgcggaacccggcugaaagacgugcaccuucaugaacugagcugcaacacagcccuccugaucgucaccauuguggucaucaugcuggugcuuggccuggcgguugccuucugcugucuccacuuugaucugcccugguaccucagaaugcuggggcagugcacacaaaccuggcaucgcgugcggaagacgacccaggagcagcuuaagagaaauguccgcuuccacgcuuuuauuuccuacucugagcacgacagccugugggugaaaaacgaacucaucccuaaucuggagaaggaagauggauccauucugaucugucuuuaugagucuuacuucgacccgggcaaaagcaucuccgagaacauuguuagcuuuaucgaaaagucuuauaaauccauuuucgugcugagccccaacuuuguccagaaugaguggugccauuacgaguucuauuuugcccaccauaaccucuuccacgaaaauucugaucauaucauucugauccuccuggaaccuauccccuuuuacuguauuccuacacgguaucacaaacuuaaggcucugcucgaaaagaaggccuaccuggaguggcccaaagacagacgcaagugcggccuguucugggccaaccuucgggcugcgaucaaugugaacgugcuggccaccagagaaauguacgagcuccaaacauucaccgaacugaaugaggaaucccgcgggagcacgauuucucucaugcggacagauugucuguga

SEQ ID NO: 9452 - protein, 811 aa, Artificial Sequence [sequence omitted]

SEQ ID NO: 9453 - RNA, 2436 nt, Artificial Sequence
  TLR10__Homo_sapiens__AAY78478
augagacucaucagaaacauuuacauauuuuguaguauaguuaugacagcagagggugaugcuccagagcugccagaagaaagggaacugaugaccaacugcuccaacaugucucuaagaaagguucccgcagacuugaccccagccacaacaacacuggauuuauccuauaaccuccuuuuucaacuccagaguucagauuuucauucugucuccaaacugagaguuuugauucuaugccauaacagaauucaacagcuggaucucaaaaccuuugaauucaacaaggaguuaagauauuuagauuugucuaauaacagacugaagaguguaacuugguauuuacuggcaggucucagguauuuagaucuuucuuuuaaugacuuugacaccaugccuaucugugaggaagcuggcaacaugucacaccuggaaauccuagguuugaguggggcaaaaauacaaaaaucagauuuccagaaaauuucucaucugcaucuaaauacugucuucuuaggauucagaacucuuccucauuaugaagaagguagccugcccaucuuaaacacaacaaaacugcacauuguuuuaccaauggacacaaauuucuggguucuuuugcgugauggaaucaagacuucaaaaauauuagaaaugacaaauauagauggcaaaagccaauuuguaaguuaugaaaugcaacgaaaucuuaguuuagaaaaugcuaagacaucgguucuauugcuuaauaaaguugauuuacucugggacgaccuuuuccuuaucuuacaauuuguuuggcauacaucaguggaacacuuucagauccgaaaugugacuuuuggugguaaggcuuaucuugaccacaauucauuugacuacucaaauacuguaaugagaacuauaaaauuggagcauguacauuucagaguguuuuacauucaacaggauaaaaucuauuugcuuuugaccaaaacggacauagaaaaccugacaauaucaaaugcacaaaugccacacaugcuuuucccuaauuauccuacgaaauuccaauauuuaaauuuugccaauaauaucuuaacagacgaguuguuuaaaagaacucuccaacugccucacuugaaaacucucauuuugaauggcaauaaacuggagacacuuucuuuaguaaguugcuuugcuaacaacacacccuuggaacacuuggaucugagucaaaaucuauuacaacauaaaaaugaugaaaauugcucauggccagaaacuguggucaauaugaaucugucauacaauaaauugucugauucugucuucaggugcuugcccaaaaguauucaaauacuugaccuaaauaauaaccaaauccaaacuguaccuaaagagacuauucaucugauggccuuacgagaacuaaauauugcauuuaauuuucuaacugaucucccuggaugcagucauuucaguagacuuucaguucugaacauugaaaugaacuucauucucagcccaucucuggauuuuguucagagcugccaggaaguuaaaacucuaaaugcgggaagaaauccauuccgguguaccugugaauuaaaaaauuucauucagcuugaaacauauucagaggucaugaugguuggauggucagauucauacaccugugaauacccuuuaaaccuaaggggaacuagguuaaaagacguucaucuccacgaauuaucuugcaacacagcucuguugauugucaccauugugguuauuaugcuaguucugggguuggcuguggccuucugcugucuccacuuugaucugcccugguaucucaggaugcuaggucaaugcacacaaacauggcacaggguuaggaaaacaacccaagaacaacucaagagaaauguccgauuccacgcauuuauuucauacagugaacaugauucucugugggugaagaaugaauugauccccaaucuagagaaggaagaugguucuaucuugauuugccuuuaugaaagcuacuuugacccuggcaaaagcauuagugaaaauauuguaagcuucauugagaaaagcuauaaguccaucuuuguuuugucucccaacuuuguccagaaugaguggugccauuaugaauucuacuuugcccaccacaaucucuuccaugaaaauucugaucacauaauucuuaucuuacuggaacccauuccauucuauugcauucccaccagguaucauaaacugaaagcucuccuggaaaaaaaagcauacuuggaauggcccaaggauaggcguaaaugugggcuuuucugggcaaaccuucgagcugcuauuaauguuaauguauuagccaccagagaaauguaugaacugcagacauucacagaguuaaaugaagagucucgagguucuacaaucucucugaugagaacagacugucuauaa

SEQ ID NO: 9454 - RNA, 2436 nt, Artificial Sequence
  derived and/or modified sequence opt1 from TLR10__Homo_sapiens__AAY78478
augcgccugauccggaacaucuacaucuucugcagcaucgugaugaccgccgagggcgacgcccccgagcucccggaggagcgcgagcugaugaccaacugcuccaacaugagccugcggaagguccccgcggaccucacgcccgccaccaccacccuggaccuguccuacaaccuccuguuccagcugcagagcuccgacuuccacagcguguccaagcuccgcgugcugauccugugccacaaccggauccagcagcucgaccugaagacguucgaguucaacaaggagcugcgcuaccucgaccugagcaacaaccggcugaaguccgucaccugguaccuccuggccgggcugcgcuaccucgaccugagcuucaacgacuucgacaccaugcccaucugcgaggaggccggcaacaugucccaccuggagauccucgggcugagcggcgccaagauccagaaguccgacuuccagaagaucagccaccuccaccugaacaccguguuccugggguuccggacgcugccgcacuacgaggagggcucccuccccauccugaacaccaccaagcugcacaucgugcuccccauggacaccaacuucuggguccugcugcgcgacggcaucaagacgagcaagauccucgagaugaccaacaucgacgggaagucccaguucgugagcuacgagaugcagcggaaccugucccuggagaacgcgaagaccagcgugcuccugcugaacaaggucgaccuccugugggacgaccuguuccucauccugcaguucguguggcacaccagcguggagcacuuccagauccgcaacgucacguucggcgggaaggccuaccuggaccacaacuccuucgacuacagcaacaccgugaugcggaccaucaagcucgagcacgugcacuuccgcgucuucuacauccagcaggacaagaucuaccugcugcugaccaagacggacaucgagaaccucaccaucuccaacgcccagaugccccacaugcuguucccgaacuaccccaccaaguuccaguaccugaacuucgccaacaacauccucaccgacgagcuguucaagcggacgcugcagcucccccaccugaagacccugauccucaacggcaacaagcuggagacccugagccucguguccugcuucgcgaacaacacgccccuggagcaccuggaccucagccagaaccugcugcagcacaagaacgacgagaacugcuccuggccggagaccguggucaacaugaaccucagcuacaacaagcuguccgacagcguguuccgcugccugcccaaguccauccagauccucgaccugaacaacaaccagauccagaccgugcccaaggagaccauccaccugauggcccuccgggagcugaacaucgccuucaacuuccugaccgaccuccccgggugcagccacuucucccgccugagcguccugaacaucgagaugaacuucauccucuccccgagccuggacuucgugcaguccugccaggaggugaagacgcugaacgccggccggaaccccuuccgcugcacgugcgagcucaagaacuucauccagcuggagaccuacagcgaggucaugauggugggcugguccgacagcuacacgugcgaguacccccugaaccuccgggggacccgccugaaggacguccaccuccacgagcugagcugcaacaccgcccugcugaucgugaccaucguggucaucaugcucgugcugggccuggcgguggccuucugcugccuccacuucgaccugcccugguaccugcgcaugcucgggcagugcacccagaccuggcaccggguccgcaagaccacccaggagcagcugaagcggaacgugcgcuuccacgccuucaucuccuacagcgagcacgacucccugugggugaagaacgagcucaucccgaaccuggagaaggaggacggcagcauccugaucugccucuacgaguccuacuucgaccccggcaagagcaucuccgagaacaucgucagcuucaucgagaaguccuacaagagcaucuucgugcugucccccaacuucgugcagaacgaguggugccacuacgaguucuacuucgcccaccacaaccuguuccacgagaacagcgaccacaucauccucauccugcuggagcccaucccguucuacugcauccccacccgguaccacaagcucaaggcccugcuggagaagaaggcguaccucgaguggcccaaggaccgccggaagugcgggcuguucugggccaaccugcgcgccgccaucaacgucaacgugcucgccacccgggagauguacgagcugcagacguucaccgagcugaacgaggagucccgcggcagcaccaucucccucaugcggaccgacugccuguga

SEQ ID NO: 9455 - RNA, 2436 nt, Artificial Sequence
  derived and/or modified sequence opt2 from TLR10__Homo_sapiens__AAY78478
augcgccucauccgcaacaucuacaucuucugcuccaucgucaugaccgccgagggcgacgcccccgagcuccccgaggagcgcgagcucaugaccaacugcuccaacaugucccuccgcaagguccccgccgaccucacccccgccaccaccacccucgaccucuccuacaaccuccucuuccagcuccaguccuccgacuuccacuccgucuccaagcuccgcguccucauccucugccacaaccgcauccagcagcucgaccucaagaccuucgaguucaacaaggagcuccgcuaccucgaccucuccaacaaccgccucaaguccgucaccugguaccuccucgccggccuccgcuaccucgaccucuccuucaacgacuucgacaccaugcccaucugcgaggaggccggcaacaugucccaccucgagauccucggccucuccggcgccaagauccagaaguccgacuuccagaagaucucccaccuccaccucaacaccgucuuccucggcuuccgcacccucccccacuacgaggagggcucccuccccauccucaacaccaccaagcuccacaucguccuccccauggacaccaacuucuggguccuccuccgcgacggcaucaagaccuccaagauccucgagaugaccaacaucgacggcaagucccaguucgucuccuacgagaugcagcgcaaccucucccucgagaacgccaagaccuccguccuccuccucaacaaggucgaccuccucugggacgaccucuuccucauccuccaguucgucuggcacaccuccgucgagcacuuccagauccgcaacgucaccuucggcggcaaggccuaccucgaccacaacuccuucgacuacuccaacaccgucaugcgcaccaucaagcucgagcacguccacuuccgcgucuucuacauccagcaggacaagaucuaccuccuccucaccaagaccgacaucgagaaccucaccaucuccaacgcccagaugccccacaugcucuuccccaacuaccccaccaaguuccaguaccucaacuucgccaacaacauccucaccgacgagcucuucaagcgcacccuccagcucccccaccucaagacccucauccucaacggcaacaagcucgagacccucucccucgucuccugcuucgccaacaacaccccccucgagcaccucgaccucucccagaaccuccuccagcacaagaacgacgagaacugcuccuggcccgagaccgucgucaacaugaaccucuccuacaacaagcucuccgacuccgucuuccgcugccuccccaaguccauccagauccucgaccucaacaacaaccagauccagaccguccccaaggagaccauccaccucauggcccuccgcgagcucaacaucgccuucaacuuccucaccgaccuccccggcugcucccacuucucccgccucuccguccucaacaucgagaugaacuucauccucucccccucccucgacuucguccaguccugccaggaggucaagacccucaacgccggccgcaaccccuuccgcugcaccugcgagcucaagaacuucauccagcucgagaccuacuccgaggucaugauggucggcugguccgacuccuacaccugcgaguacccccucaaccuccgcggcacccgccucaaggacguccaccuccacgagcucuccugcaacaccgcccuccucaucgucaccaucgucgucaucaugcucguccucggccucgccgucgccuucugcugccuccacuucgaccuccccugguaccuccgcaugcucggccagugcacccagaccuggcaccgcguccgcaagaccacccaggagcagcucaagcgcaacguccgcuuccacgccuucaucuccuacuccgagcacgacucccucugggucaagaacgagcucauccccaaccucgagaaggaggacggcuccauccucaucugccucuacgaguccuacuucgaccccggcaaguccaucuccgagaacaucgucuccuucaucgagaaguccuacaaguccaucuucguccucucccccaacuucguccagaacgaguggugccacuacgaguucuacuucgcccaccacaaccucuuccacgagaacuccgaccacaucauccucauccuccucgagcccauccccuucuacugcauccccacccgcuaccacaagcucaaggcccuccucgagaagaaggccuaccucgaguggcccaaggaccgccgcaagugcggccucuucugggccaaccuccgcgccgccaucaacgucaacguccucgccacccgcgagauguacgagcuccagaccuucaccgagcucaacgaggagucccgcggcuccaccaucucccucaugcgcaccgacugccucuga

SEQ ID NO: 9456 - RNA, 2436 nt, Artificial Sequence
  derived and/or modified sequence opt3 from TLR10__Homo_sapiens__AAY78478
augagacugaucaggaacauuuacauauucugcagcaucgugaugaccgccgagggcgacgcucccgaacucccugaggaacgggagcuuaugacaaauuguuccaacaugucucugcgcaaggucccagcagauuugacuccggccacgaccacauuagaccugucauauaaucuacucuuucagcugcaaaguagcgauuuccacuccguuucuaaacuucgagugcugauuuugugccauaaccguauccagcagcucgaccugaagacuuuugaguucaauaaagaacugagauaccucgauuuaucgaacaauaggcugaagucaguaaccugguaucuuuuggcggggcugcgguaccuagaccucagcuuuaacgauuucgacacaaugcccauuugugaggaagcuggaaauaugagucaccuggagauccuuggucuguccggcgccaaaauacagaagucugauuuucaaaagaucagccauuugcaccucaacaccguguuccugggguuucgcacuuuaccucauuaugaagagggaucccugccaauucucaauacaaccaaacuucacaucguccugcccauggacacgaacuucuggguguugcuaagagauggcauuaagacuucaaaaauccuggagaugaccaauauagacgguaagagucaguuuguuagcuacgaaaugcagaggaaccucucucuggagaaugcaaaaacauccgugcuucuguugaacaaggucgaucuccugugggacgacuuauuccugauucuacaguuuguguggcacacuucaguagaacauuuccaaauccggaacguuaccuucgggggaaaggccuaucucgaucacaauagcuuugacuacaguaacacagugaugcgcaccauuaaacuggagcauguccacuuccgaguguuuuacauccagcaggauaagaucuaucuuuugcugacgaaaacugacauugaaaaucucacaauaucuaacgcucagaugccucacaugcuguucccaaauuaccccaccaaguuucaauaucuuaacuucgcaaauaacauccugacugaugaguuguuuaaaagaacacuccagcugccucauuuaaagacccugauucuaaauggcaacaaacucgagacgcugucccuugugagcugcuucgccaauaacaccccauuggaacaccuggaccucucgcagaaucuguuacaacauaagaacgaugagaauuguucuuggccggaaacagucguuaacaugaaccuguccuacaauaaacuuucagacaguguguuuaggugcuugcccaagagcauccagauacucgaucugaacaauaaccagauucagacuguaccuaaggagaccauccaccuaauggcucugcgggaacucaauaucgccuucaacuuucugacagaccuuccaggcuguucccauuucucucguuugagcgugcugaauauugagaugaacuuuaucuuaucacccagucucgauuucguccaauccugccaggaggugaaaacucugaaugcggggcgcaacccuuucagauguaccugcgaacuuaagaauuuuauucagcuggagacauauagcgaaguuaugauggugggauggucugacucauacaccugugaguauccauugaaccucagggguacucggcugaaagacguccaccuacacgaacugaguugcaauacggcacuccugauagugacaaucguaguuauuaugcuuguguugggccuggccgucgcuuucugcuguuuacauuuugaucuccccugguaccugcgaaugcuugggcagugcacccaaacuuggcaccgcgugagaaagaccacacaggagcagcugaagaggaacguccgguuccaugccuuuaucagcuacuccgagcacgacucucuaugggugaaaaaugaacucaucccgaaccuggagaaggaagauggaucgauuuugauaugucuguaugagagcuacuucgacccuggcaaauccaucucagagaacauuguuaguuuuaucgaaaagucuuauaaaagcauuuucguguuaucccccaauuuuguacagaacgaguggugccacuacgaguucuauuuugcacaucacaaucucuuccaugaaaacucagaucacaucauacugauccuucuggaaccaauuccuuuuuacuguauccccacccgcuaucauaaguugaaggcucuccuggagaaaaaggccuaccuagaguggccaaaagacagaaggaagugcggucuguucugggcgaaucuucgugccgcaauuaacgucaaugugcucgcuacucgggaaauguacgagcugcaaacauucacggaauugaacgaggaaagccgagggucuaccaucucccugaugagaacugauuguuuauga

SEQ ID NO: 9457 - RNA, 2436 nt, Artificial Sequence
  derived and/or modified sequence opt4 from TLR10__Homo_sapiens__AAY78478
augagacugaucagaaacaucuacaucuucugcagcaucgugaugaccgccgagggcgacgcccccgagcugcccgaggagagagagcugaugaccaacugcagcaacaugagccugagaaaggugcccgccgaccugacccccgccaccaccacccuggaccugagcuacaaccugcuguuccagcugcagagcagcgacuuccacagcgugagcaagcugagagugcugauccugugccacaacagaauccagcagcuggaccugaagaccuucgaguucaacaaggagcugagauaccuggaccugagcaacaacagacugaagagcgugaccugguaccugcuggccggccugagauaccuggaccugagcuucaacgacuucgacaccaugcccaucugcgaggaggccggcaacaugagccaccuggagauccugggccugagcggcgccaagauccagaagagcgacuuccagaagaucagccaccugcaccugaacaccguguuccugggcuucagaacccugccccacuacgaggagggcagccugcccauccugaacaccaccaagcugcacaucgugcugcccauggacaccaacuucugggugcugcugagagacggcaucaagaccagcaagauccuggagaugaccaacaucgacggcaagagccaguucgugagcuacgagaugcagagaaaccugagccuggagaacgccaagaccagcgugcugcugcugaacaagguggaccugcugugggacgaccuguuccugauccugcaguucguguggcacaccagcguggagcacuuccagaucagaaacgugaccuucggcggcaaggccuaccuggaccacaacagcuucgacuacagcaacaccgugaugagaaccaucaagcuggagcacgugcacuucagaguguucuacauccagcaggacaagaucuaccugcugcugaccaagaccgacaucgagaaccugaccaucagcaacgcccagaugccccacaugcuguuccccaacuaccccaccaaguuccaguaccugaacuucgccaacaacauccugaccgacgagcuguucaagagaacccugcagcugccccaccugaagacccugauccugaacggcaacaagcuggagacccugagccuggugagcugcuucgccaacaacaccccccuggagcaccuggaccugagccagaaccugcugcagcacaagaacgacgagaacugcagcuggcccgagaccguggugaacaugaaccugagcuacaacaagcugagcgacagcguguucagaugccugcccaagagcauccagauccuggaccugaacaacaaccagauccagaccgugcccaaggagaccauccaccugauggcccugagagagcugaacaucgccuucaacuuccugaccgaccugcccggcugcagccacuucagcagacugagcgugcugaacaucgagaugaacuucauccugagccccagccuggacuucgugcagagcugccaggaggugaagacccugaacgccggcagaaaccccuucagaugcaccugcgagcugaagaacuucauccagcuggagaccuacagcgaggugaugauggugggcuggagcgacagcuacaccugcgaguacccccugaaccugagaggcaccagacugaaggacgugcaccugcacgagcugagcugcaacaccgcccugcugaucgugaccaucguggugaucaugcuggugcugggccuggccguggccuucugcugccugcacuucgaccugcccugguaccugagaaugcugggccagugcacccagaccuggcacagagugagaaagaccacccaggagcagcugaagagaaacgugagauuccacgccuucaucagcuacagcgagcacgacagccugugggugaagaacgagcugauccccaaccuggagaaggaggacggcagcauccugaucugccuguacgagagcuacuucgaccccggcaagagcaucagcgagaacaucgugagcuucaucgagaagagcuacaagagcaucuucgugcugagccccaacuucgugcagaacgaguggugccacuacgaguucuacuucgcccaccacaaccuguuccacgagaacagcgaccacaucauccugauccugcuggagcccauccccuucuacugcauccccaccagauaccacaagcugaaggcccugcuggagaagaaggccuaccuggaguggcccaaggacagaagaaagugcggccuguucugggccaaccugagagccgccaucaacgugaacgugcuggccaccagagagauguacgagcugcagaccuucaccgagcugaacgaggagagcagaggcagcaccaucagccugaugagaaccgacugccuguga

SEQ ID NO: 9458 - RNA, 2436 nt, Artificial Sequence
  derived and/or modified sequence opt5 from TLR10__Homo_sapiens__AAY78478
augagacugauccggaacauuuacaucuucugcagcauugugaugaccgccgagggcgacgcucccgaacucccugaggaacgcgagcugaugacaaauuguuccaacaugucucuuagaaaggucccggccgaucugacgcccgcgaccacaacccucgaccugagcuauaaucuucuguuucagcuccaauccucugauuuccacagcguuuccaaacugcgggugcugauccucugccauaaccgcauucagcagcuggaccuuaagacauuugaguucaauaaagaacugagauaccucgaucugucuaacaaucggcuuaagagcgugaccugguaucugcucgcugggcugcgcuaccuggaccucuccuuuaacgauuucgacacaaugccuaucugugaggaagccggaaauaugagccaccuggagauccuuggccugucuggggccaaaauucagaaguccgauuuucaaaagaucagccaucuccaccugaacaccgucuuccuuggauuuagaacgcugccccauuaugaagagggcucucucccuauucugaauaccacaaaacugcacaucgugcuccccauggacaccaacuucuggguucugcuucgggaugggauuaagacauccaaaauccuggagaugaccaauauugacggaaagagccaguuugugucuuacgaaaugcagcgcaaccucucccuggagaaugcuaaaacgagcguccuucugcucaacaagguggaucugcugugggacgaccucuuccugauccuucaguuuguuuggcacacauccguggaacauuuccaaaucagaaacgucaccuucggcggcaaggccuaucuggaucacaauucuuuugacuacagcaacacagugaugcggaccauuaaacucgagcaugugcacuuccgcgucuuuuacauccagcaggauaagauuuaucugcugcuuaccaaaacagacaucgaaaaucucacgauuuccaacgcucagaugccucacaugcuguucccgaauuaccccaccaaguuucaauaucugaacuucgccaauaacauccucacagaugagcuguuuaaaagaacccuucagcugccucaucucaagacacugauccugaaugggaacaaacuugagacccucagccugguuucuugcuucgcgaauaacacgccccuggaacaccucgaccugucccagaaucuucugcaacauaagaacgaugagaauuguagcuggccugaaacaguggugaacaugaaccucucuuacaauaagcugagcgacuccgucuuucggugccugcccaaaucuauucagauccuugaucucaacaauaaccagauucagaccgugccgaaggagaccauccaccugauggcccugcgcgaacucaauauugcuuucaacuuucugacagaccuuccuggauguagccauuucuccagacugagcguucucaauaucgagaugaacuuuauccugucucccucccuggauuucgugcaaagcugccaggaggucaaaacccuuaaugccggccggaacccuuucagauguacaugcgaacucaagaauuuuauucagcuggagacguauucugaagugaugaugguugggugguccgacagcuacaccugugaguauccccugaaccuccgcggaacacggcugaaagacgugcaccuucacgaacuguccugcaauaccgcucuccugaucgucacaauuguggucaucaugcuggugcuuggccuggccguugcguucugcugucuccauuuugaucugcccugguaccucagaaugcuggggcagugcacccaaacguggcaccgcgugcggaagaccacacaggagcagcuuaagagaaacguccgcuuccaugccuuuauuucuuacagcgagcacgacucccugugggugaaaaaugaacucaucccuaaccuggagaaggaagauggaucuauucugaucugucuuuaugagagcuacuucgacccgggcaaauccaucagcgagaacauuguuucuuuuaucgaaaaguccuauaaaagcauuuucgugcugucucccaauuuuguccagaacgaguggugccacuacgaguucuauuuugcucaucacaaucucuuccaugaaaacuccgaucacaucauucugauccuccuggaaccuauccccuuuuacuguauuccuacccgguaucauaaacuuaaggcccugcucgagaagaaggcuuaccuggaguggcccaaagacagacgcaagugcggccuguucugggccaaucuucgggccgcuaucaacgugaaugugcuggcgacaagagaaauguacgagcuccaaaccuucacggaacugaacgaggaaagccgcgggucuacaauuagccucaugcggaccgauugucuguga

SEQ ID NO: 9459 - protein, 811 aa, Artificial Sequence [sequence omitted]

SEQ ID NO: 9460 - RNA, 2436 nt, Artificial Sequence
  TLR10__Homo_sapiens__AAY78482
augagacucaucagaaacauuuacauauuuuguaguauuguuaugacagcagagggugaugcuccagagcugccagaagaaagggaacugaugaccaacugcuccaacaugucucuaagaaagguucccgcagacuugaccccagccacaacgacacuggauuuauccuauaaccuccuuuuucaacuccagaguucagauuuucauucugucuccaaacugagaguuuugauucuaugccauaacagaauucaacagcuggaucucaaaaccuuugaauucaacaaggaguuaagauauuuagauuugucuaauaacagacugaagaguguaacuugguauuuacuggcaggucucagguauuuagaucuuucuuuuaaugacuuugacaccaugccuaucugugaggaagcuggcaacaugucacaccuggaaauccuagguuugaguggggcaaaaauacaaaaaucagauuuccagaaaauugcucaucugcaucuaaauacugucuucuuaggauucagaacucuuccucauuaugaagaagguagccugcccaucuuaaacacaacaaaacugcacauuguuuuaccaauggacacaaauuucuggguucuuuugcgugauggaaucaagacuucaaaaauauuagaaaugacaaauauagauggcaaaagccaauuuguaaguuaugaaaugcaacgaaaucuuaguuuagaacaugcuaagacaucgguucuauugcuuaauaaaguugauuuacucugggacgaccuuuuccuuaucuuacaauuuguuuggcauacaucaguggaacacuuucagauccgaaaugugacuuuuggugguaaggcuuaucuugaccacaauucauuugacuacucaaauacuguaaugagaacuauaaaauuggagcauguacauuucagaguguuuuacauucaacaggauaaaaucuauuugcuuuugaccaaaauggacauagaaaaccugacaauaucaaaugcacaaaugccacacaugcuuuucccuaauuauccuacgaaauuccaauauuuaaauuuugccaauaauaucuuaacagacgaguuguuuaaaagaacucuccaacugccucacuugaaaacucucauuuugaauggcaauaaacuggagacacuuucuuuaguaaguugcuuugcuaacaacacacccuuggaacacuuggaucugagucaaaaucuauuacaacauaaaaaugaugaaaauugcucauggccagaaacuguggucaauaugaaucugucauacaauaaauugucugauucugucuucaggugcuugcccaaaaguauucaaauacuugaccuaaauaauaaccaaauccaaacuguaccuaaagagacuauucaucugauggccuuacgagaacuaaauauugcauuuaauuuucuaacugaucucccuggaugcagucauuucaguagacuuucaguucugaacauugaaaugaacuucauucucagcccaucucuggauuuuguucagagcugccaggaaguuaaaacucuaaaugcgggaagaaauccauuccgguguaccugugaauuaaaaaauuucauucagcuugaaacauauucagaggucaugaugguuggauggucagauucauacaccugugaauacccuuuaaaccuaaggggaacuagguuaaaagacguucaucuccacgaauuaucuugcaacacagcucuguugauugucaccauugugguuauuaugcuaguucugggguuggcuguggccuucugcugucuccacuuugaucugcccugguaucucaggaugcuaggucaaugcacacaaacauggcacaggguuaggaaaacaacccaagaacaacucaagagaaauguccgauuccacgcauuuauuucauacagugaacaugauucucugugggugaagaaugaauugauccccaaucuagagaaggaagaugguucuaucuugauuugccuuuaugaaagcuacuuugacccuggcaaaagcauuagugaaaauauuguaagcuucauugagaaaagcuauaaguccaucuuuguuuugucucccaacuuuguccagaaugaguggugccauuaugaauucuacuuugcccaccacaaucucuuccaugaaaauucugaucacauaauucuuaucuuacuggaacccauuccauucuauugcauucccaccagguaucauaaacugaaagcucuccuggaaaaaaaagcauacuuggaauggcccaaggauaggcguaaaugugggcuuuucugggcaaaccuucgagcugcuguuaauguuaauguauuagccaccagagaaauguaugaacugcagacauucacagaguuaaaugaagagucucgagguucuacaaucucucugaugagaacagauugucuauaa

SEQ ID NO: 9461 - RNA, 2436 nt, Artificial Sequence
  derived and/or modified sequence opt1 from TLR10__Homo_sapiens__AAY78482
augcgccugauccggaacaucuacaucuucugcagcaucgugaugaccgccgagggcgacgcccccgagcucccggaggagcgcgagcugaugaccaacugcuccaacaugagccugcggaagguccccgcggaccucacgcccgccaccaccacccuggaccuguccuacaaccuccuguuccagcugcagagcuccgacuuccacagcguguccaagcuccgcgugcugauccugugccacaaccggauccagcagcucgaccugaagacguucgaguucaacaaggagcugcgcuaccucgaccugagcaacaaccggcugaaguccgucaccugguaccuccuggccgggcugcgcuaccucgaccugagcuucaacgacuucgacaccaugcccaucugcgaggaggccggcaacaugucccaccuggagauccucgggcugagcggcgccaagauccagaaguccgacuuccagaagaucgcgcaccuccaccugaacaccguguuccugggguuccggacgcugccgcacuacgaggagggcagccuccccauccugaacaccaccaagcugcacaucgugcuccccauggacaccaacuucuggguccugcugcgcgacggcaucaagacguccaagauccucgagaugaccaacaucgacgggaagucccaguucgugagcuacgagaugcagcggaaccugagccuggagcacgccaagaccuccgugcuccugcugaacaaggucgaccuccugugggacgaccuguuccucauccugcaguucguguggcacaccagcguggagcacuuccagauccgcaacgucacguucggcgggaaggccuaccuggaccacaacagcuucgacuacuccaacaccgugaugcggaccaucaagcucgagcacgugcacuuccgcgucuucuacauccagcaggacaagaucuaccugcugcugaccaagauggacaucgagaaccucacgaucagcaacgcccagaugccccacaugcuguucccgaacuaccccaccaaguuccaguaccugaacuucgcgaacaacauccucaccgacgagcuguucaagcggacccugcagcucccccaccugaagacgcugauccucaacggcaacaagcuggagacccugucccucgugagcugcuucgccaacaacacgccccuggagcaccuggaccucucccagaaccugcugcagcacaagaacgacgagaacugcagcuggccggagaccguggucaacaugaaccucuccuacaacaagcugagcgacuccguguuccgcugccugcccaagagcauccagauccucgaccugaacaacaaccagauccagaccgugcccaaggagaccauccaccugauggcccuccgggagcugaacaucgccuucaacuuccugaccgaccuccccgggugcucccacuucagccgccuguccguccugaacaucgagaugaacuucauccucagcccgucccuggacuucgugcagagcugccaggaggugaagacccugaacgccggccggaaccccuuccgcugcacgugcgagcucaagaacuucauccagcuggagaccuacuccgaggucaugauggugggcuggagcgacuccuacacgugcgaguacccccugaaccuccgggggacccgccugaaggacguccaccuccacgagcugagcugcaacaccgcgcugcugaucgugaccaucguggucaucaugcucgugcugggccuggccguggccuucugcugccuccacuucgaccugcccugguaccugcgcaugcucgggcagugcacccagaccuggcaccggguccgcaagaccacgcaggagcagcugaagcggaacgugcgcuuccacgccuucaucagcuacuccgagcacgacagccugugggugaagaacgagcucaucccgaaccuggagaaggaggacggcuccauccugaucugccucuacgagagcuacuucgaccccggcaaguccaucagcgagaacaucgucuccuucaucgagaaguccuacaagagcaucuucgugcugagccccaacuucgugcagaacgaguggugccacuacgaguucuacuucgcccaccacaaccuguuccacgagaacuccgaccacaucauccucauccugcuggagcccaucccguucuacugcauccccacccgguaccacaagcucaaggcgcugcuggagaagaaggccuaccucgaguggcccaaggaccgccggaagugcgggcuguucugggccaaccugcgcgccgccgucaacgugaacgugcucgcgacccgggagauguacgagcugcagaccuucacggagcugaacgaggagagccgcggcuccaccaucagccucaugcggaccgacugccuguga

SEQ ID NO: 9462 - RNA, 2436 nt, Artificial Sequence
  derived and/or modified sequence opt2 from TLR10__Homo_sapiens__AAY78482
augcgccucauccgcaacaucuacaucuucugcuccaucgucaugaccgccgagggcgacgcccccgagcuccccgaggagcgcgagcucaugaccaacugcuccaacaugucccuccgcaagguccccgccgaccucacccccgccaccaccacccucgaccucuccuacaaccuccucuuccagcuccaguccuccgacuuccacuccgucuccaagcuccgcguccucauccucugccacaaccgcauccagcagcucgaccucaagaccuucgaguucaacaaggagcuccgcuaccucgaccucuccaacaaccgccucaaguccgucaccugguaccuccucgccggccuccgcuaccucgaccucuccuucaacgacuucgacaccaugcccaucugcgaggaggccggcaacaugucccaccucgagauccucggccucuccggcgccaagauccagaaguccgacuuccagaagaucgcccaccuccaccucaacaccgucuuccucggcuuccgcacccucccccacuacgaggagggcucccuccccauccucaacaccaccaagcuccacaucguccuccccauggacaccaacuucuggguccuccuccgcgacggcaucaagaccuccaagauccucgagaugaccaacaucgacggcaagucccaguucgucuccuacgagaugcagcgcaaccucucccucgagcacgccaagaccuccguccuccuccucaacaaggucgaccuccucugggacgaccucuuccucauccuccaguucgucuggcacaccuccgucgagcacuuccagauccgcaacgucaccuucggcggcaaggccuaccucgaccacaacuccuucgacuacuccaacaccgucaugcgcaccaucaagcucgagcacguccacuuccgcgucuucuacauccagcaggacaagaucuaccuccuccucaccaagauggacaucgagaaccucaccaucuccaacgcccagaugccccacaugcucuuccccaacuaccccaccaaguuccaguaccucaacuucgccaacaacauccucaccgacgagcucuucaagcgcacccuccagcucccccaccucaagacccucauccucaacggcaacaagcucgagacccucucccucgucuccugcuucgccaacaacaccccccucgagcaccucgaccucucccagaaccuccuccagcacaagaacgacgagaacugcuccuggcccgagaccgucgucaacaugaaccucuccuacaacaagcucuccgacuccgucuuccgcugccuccccaaguccauccagauccucgaccucaacaacaaccagauccagaccguccccaaggagaccauccaccucauggcccuccgcgagcucaacaucgccuucaacuuccucaccgaccuccccggcugcucccacuucucccgccucuccguccucaacaucgagaugaacuucauccucucccccucccucgacuucguccaguccugccaggaggucaagacccucaacgccggccgcaaccccuuccgcugcaccugcgagcucaagaacuucauccagcucgagaccuacuccgaggucaugauggucggcugguccgacuccuacaccugcgaguacccccucaaccuccgcggcacccgccucaaggacguccaccuccacgagcucuccugcaacaccgcccuccucaucgucaccaucgucgucaucaugcucguccucggccucgccgucgccuucugcugccuccacuucgaccuccccugguaccuccgcaugcucggccagugcacccagaccuggcaccgcguccgcaagaccacccaggagcagcucaagcgcaacguccgcuuccacgccuucaucuccuacuccgagcacgacucccucugggucaagaacgagcucauccccaaccucgagaaggaggacggcuccauccucaucugccucuacgaguccuacuucgaccccggcaaguccaucuccgagaacaucgucuccuucaucgagaaguccuacaaguccaucuucguccucucccccaacuucguccagaacgaguggugccacuacgaguucuacuucgcccaccacaaccucuuccacgagaacuccgaccacaucauccucauccuccucgagcccauccccuucuacugcauccccacccgcuaccacaagcucaaggcccuccucgagaagaaggccuaccucgaguggcccaaggaccgccgcaagugcggccucuucugggccaaccuccgcgccgccgucaacgucaacguccucgccacccgcgagauguacgagcuccagaccuucaccgagcucaacgaggagucccgcggcuccaccaucucccucaugcgcaccgacugccucuga

SEQ ID NO: 9463 - RNA, 2436 nt, Artificial Sequence
  derived and/or modified sequence opt3 from TLR10__Homo_sapiens__AAY78482
augagacugaucaggaacauuuacauauucugcagcaucgugaugaccgccgagggcgacgcucccgaacucccugaggaacgggagcuuaugacaaauuguuccaacaugucucugcgcaaggucccagcagauuugacuccggccacgaccacauuagaccugucauauaaucuacucuuucagcugcaaaguagcgauuuccacuccguuucuaaacuucgagugcugauuuugugccauaaccguauccagcagcucgaccugaagacuuuugaauuuaauaaagagcugagauaccucgauuuaucgaacaauaggcugaagucaguaaccugguaucuuuuggcggggcugcgguaccuagaccucagcuucaacgauuucgacacaaugcccauuugugaggaagcuggaaauaugagucaccuggagauccuuggucuguccggcgccaaaauacagaagucugauuuucaaaagaucgcacauuugcaccucaacaccguguuccugggguuucgcacuuuaccucauuaugaagagggaagccugccaauucucaauacaaccaaacuucacaucguccugcccauggacacgaacuucuggguguugcuaagagauggcauuaagacuuccaaaauccuggagaugaccaauauagacgguaagucacaguuuguuaguuacgaaaugcagaggaaccucagccuggagcacgccaaaacaucugugcuucuguugaauaaggucgaucuccugugggacgacuuauuccugauucuacaguuuguguggcauacuuccguagaacacuuccaaauccggaacguuaccuucgggggaaaggcuuaucucgaucauaacucauuugacuacagcaauacagugaugcgcaccauuaaacuggagcacguccacuuccgaguguuuuacauccagcaggauaagaucuaucuuuugcugacgaaaauggacauugaaaaccucacuauaaguaaugcacagaugccucauaugcuguucccaaacuaccccacaaaguuucaauaucuuaauuucgccaacaauauccugaccgaugaguuguuuaaaagaacucuccagcugccucacuuaaagacacugauucuaaacggcaauaaacucgagacccugucucuuguguccugcuucgcuaacaauacgccauuggaacaucuggaccucagccagaaccuguuacaacacaagaaugaugagaacuguucguggccggaaaccgucguuaauaugaaccugucuuacaacaaacuuuccgacucaguguuuaggugcuugcccaagaguauccagauacucgaucugaauaacaaucagauucagacaguaccuaaggagacuauccaucuaauggcccugcgggaacucaacaucgcguucaauuuucugaccgaccuuccaggcuguagccacuucucccguuugucugugcugaacauugagaugaauuuuaucuuaagccccucacucgauuucguccaaaguugccaggaggugaaaacacugaacgcagggcgcaauccuuucagauguacuugcgaacuuaagaacuuuauucagcuggagaccuauuccgaaguuaugauggugggauggagcgacucuuacacaugugaguauccauugaaucucagggguacccggcugaaagacguccaccuacaugaacugucaugcaacacugcccuccugauagugacgaucguaguuauuaugcuuguguugggccuggcugucgccuucugcuguuuacacuuugaucuccccugguaccugcgaaugcuugggcagugcacacaaaccuggcaucgcgugagaaagacuacccaggagcagcugaagaggaauguccgguuccacgcauuuaucaguuacagcgagcacgacucccuaugggugaaaaacgaacucaucccgaaucuggagaaggaagauggaucuauuuugauaugucuguaugagucguacuucgacccuggcaaaagcaucuccgagaacauuguuucauuuaucgaaaagaguuauaaaucuauuuucguguuaagccccaacuuuguacagaaugaguggugccauuacgaguucuauuuugcucaccauaaccucuuccacgaaaauuccgaucauaucauacugauccuucuggaaccaauuccuuuuuacuguauccccacacgcuaucacaaguugaaggcccuccuggagaaaaaggcguaccuagaguggccaaaagacagaaggaagugcggucuguucugggccaaccuucgugcagcugucaaugugaacguucucgccacccgggaaauguacgagcugcaaacuuucacagaauugaaugaggaaucacgagggagcacgauuucucugaugagaaccgauuguuuauga

SEQ ID NO: 9464 - RNA, 2436 nt, Artificial Sequence
  derived and/or modified sequence opt4 from TLR10__Homo_sapiens__AAY78482
augagacugaucagaaacaucuacaucuucugcagcaucgugaugaccgccgagggcgacgcccccgagcugcccgaggagagagagcugaugaccaacugcagcaacaugagccugagaaaggugcccgccgaccugacccccgccaccaccacccuggaccugagcuacaaccugcuguuccagcugcagagcagcgacuuccacagcgugagcaagcugagagugcugauccugugccacaacagaauccagcagcuggaccugaagaccuucgaguucaacaaggagcugagauaccuggaccugagcaacaacagacugaagagcgugaccugguaccugcuggccggccugagauaccuggaccugagcuucaacgacuucgacaccaugcccaucugcgaggaggccggcaacaugagccaccuggagauccugggccugagcggcgccaagauccagaagagcgacuuccagaagaucgcccaccugcaccugaacaccguguuccugggcuucagaacccugccccacuacgaggagggcagccugcccauccugaacaccaccaagcugcacaucgugcugcccauggacaccaacuucugggugcugcugagagacggcaucaagaccagcaagauccuggagaugaccaacaucgacggcaagagccaguucgugagcuacgagaugcagagaaaccugagccuggagcacgccaagaccagcgugcugcugcugaacaagguggaccugcugugggacgaccuguuccugauccugcaguucguguggcacaccagcguggagcacuuccagaucagaaacgugaccuucggcggcaaggccuaccuggaccacaacagcuucgacuacagcaacaccgugaugagaaccaucaagcuggagcacgugcacuucagaguguucuacauccagcaggacaagaucuaccugcugcugaccaagauggacaucgagaaccugaccaucagcaacgcccagaugccccacaugcuguuccccaacuaccccaccaaguuccaguaccugaacuucgccaacaacauccugaccgacgagcuguucaagagaacccugcagcugccccaccugaagacccugauccugaacggcaacaagcuggagacccugagccuggugagcugcuucgccaacaacaccccccuggagcaccuggaccugagccagaaccugcugcagcacaagaacgacgagaacugcagcuggcccgagaccguggugaacaugaaccugagcuacaacaagcugagcgacagcguguucagaugccugcccaagagcauccagauccuggaccugaacaacaaccagauccagaccgugcccaaggagaccauccaccugauggcccugagagagcugaacaucgccuucaacuuccugaccgaccugcccggcugcagccacuucagcagacugagcgugcugaacaucgagaugaacuucauccugagccccagccuggacuucgugcagagcugccaggaggugaagacccugaacgccggcagaaaccccuucagaugcaccugcgagcugaagaacuucauccagcuggagaccuacagcgaggugaugauggugggcuggagcgacagcuacaccugcgaguacccccugaaccugagaggcaccagacugaaggacgugcaccugcacgagcugagcugcaacaccgcccugcugaucgugaccaucguggugaucaugcuggugcugggccuggccguggccuucugcugccugcacuucgaccugcccugguaccugagaaugcugggccagugcacccagaccuggcacagagugagaaagaccacccaggagcagcugaagagaaacgugagauuccacgccuucaucagcuacagcgagcacgacagccugugggugaagaacgagcugauccccaaccuggagaaggaggacggcagcauccugaucugccuguacgagagcuacuucgaccccggcaagagcaucagcgagaacaucgugagcuucaucgagaagagcuacaagagcaucuucgugcugagccccaacuucgugcagaacgaguggugccacuacgaguucuacuucgcccaccacaaccuguuccacgagaacagcgaccacaucauccugauccugcuggagcccauccccuucuacugcauccccaccagauaccacaagcugaaggcccugcuggagaagaaggccuaccuggaguggcccaaggacagaagaaagugcggccuguucugggccaaccugagagccgccgugaacgugaacgugcuggccaccagagagauguacgagcugcagaccuucaccgagcugaacgaggagagcagaggcagcaccaucagccugaugagaaccgacugccuguga

SEQ ID NO: 9465 - RNA, 2436 nt, Artificial Sequence
  derived and/or modified sequence opt5 from TLR10__Homo_sapiens__AAY78482
augagacugauccggaacauuuacaucuucugcagcauugugaugaccgccgagggcgacgcucccgaacucccugaggaacgcgagcugaugacaaauuguuccaacaugucucuuagaaaggucccggccgaucugacgcccgcgaccacaacccucgaccugagcuauaaucuucuguuucagcuccaauccucugauuuccacagcguuuccaaacugcgggugcugauccucugccauaaccgcauucagcagcuggaccuuaagacauuugaguucaauaaagagcugagauaccucgaucugucuaacaaucggcuuaagagcgugaccugguaucugcucgcugggcugcgcuaccuggaccucuccuuuaacgauuucgacacaaugccuaucugugaggaagccggaaauaugagccaccuggagauccuuggccugucuggggccaaaauucagaaguccgauuuucaaaagaucgcucaucuccaccugaacaccgucuuccuuggauuuagaacgcugccccauuaugaagagggcagccucccuauucugaauaccacaaaacugcacaucgugcuccccauggacaccaacuucuggguucugcuucgggaugggauuaagacaucuaaaauccuggagaugaccaauauugacggaaagucccaguuugugagcuacgaaaugcagcgcaaccucucucuggagcacgccaaaacguccguccuucugcucaauaagguggaucugcugugggacgaccucuuccugauccuucaguuuguuuggcauacaagcguggaacacuuccaaaucagaaacgucaccuucggcggcaaggcuuaucuggaucauaacuccuuugacuacucuaauacagugaugcggaccauuaaacucgagcacgugcacuuccgcgucuuuuacauccagcaggauaagauuuaucugcugcuuaccaaaauggacaucgaaaaccucacaauuagcaaugcccagaugccucauaugcuguucccgaacuaccccacgaaguuucaauaucugaauuucgcgaacaauauccucaccgaugagcuguuuaaaagaacacuucagcugccucaccucaagacccugauccugaacgggaauaaacuugagacacucucccugguuagcugcuucgccaacaauacgccccuggaacaucucgaccugucucagaaccuucugcaacacaagaaugaugagaacuguuccuggccugaaaccguggugaauaugaaccucagcuacaacaagcugucugacagcgucuuucggugccugcccaaauccauucagauccuugaucucaauaacaaucagauucagacagugccgaaggagaccauccaucugauggcucugcgcgaacucaacauugccuucaauuuucugaccgaccuuccuggauguucucacuucagcagacuguccguucucaacaucgagaugaauuuuauccugagccccucucuggauuucgugcaauccugccaggaggucaaaacacuuaacgcuggccggaauccuuucagauguaccugcgaacucaagaacuuuauucagcuggagacauauagcgaagugaugaugguuggguggucugacuccuacacgugugaguauccccugaaucuccgcggaacccggcugaaagacgugcaccuucaugaacugagcugcaacacagcccuccugaucgucaccauuguggucaucaugcuggugcuuggccuggcgguugccuucugcugucuccacuuugaucugcccugguaccucagaaugcuggggcagugcacacaaaccuggcaucgcgugcggaagacgacccaggagcagcuuaagagaaauguccgcuuccacgcuuuuauuuccuacucugagcacgacagccugugggugaaaaacgaacucaucccuaaucuggagaaggaagauggauccauucugaucugucuuuaugagucuuacuucgacccgggcaaaagcaucuccgagaacauuguuagcuuuaucgaaaagucuuauaaauccauuuucgugcugagccccaacuuuguccagaaugaguggugccauuacgaguucuauuuugcccaccauaaccucuuccacgaaaauucugaucauaucauucugauccuccuggaaccuauccccuuuuacuguauuccuacacgguaucacaaacuuaaggcucugcucgaaaagaaggccuaccuggaguggcccaaagacagacgcaagugcggccuguucugggccaaccuucgggcugcggugaaugugaacguucuggccaccagagaaauguacgagcuccaaacauucaccgaacugaaugaggaaucccgcgggagcacgaucucucucaugcggacagauugucuguga

SEQ ID NO: 9466 - protein, 811 aa, Artificial Sequence [sequence omitted]

SEQ ID NO: 9467 - RNA, 2436 nt, Artificial Sequence
  TLR10__Homo_sapiens__AAY78484
augagacucaucagaaacauuuacauauuuuguaguauuguuaugacagcagagggugaugcuccagagcugccagaagaaagggaacugaugaccaacugcuccaacaugucucuaagaaagguucccgcagacuugaccccagccacaacgacacuggauuuauccuauaaccuccuuuuucaacuccagaguucagauuuucauucugucuccaaacugagaguuuugauucuaugccauaacagaauucaacagcuggaucucaaaaccuuugaauucaacaaggaguuaagauauuuagauuugucuaauaacagacugaagaguguaacuugguauuuacuggcaggucucagguauuuagaucuuucuuuuaaugacuuugacaccaugccuaucugugaggaagcuggcaacaugucacaccuggaaauccuagguuugaguggggcaaaaauacaaaaaucagauuuccagaaaauugcucaucugcaucuaaauacugucuucuuaggauucagaacucuuccucauuaugaagaagguagccugcccaucuuaaacacaacaaaacugcacauuguuuuaccaauggacacaaauuucuggguucuuuugcgugauggaaucaagacuucaaaaauauuagaaaugacaaauauagauggcaaaagccaauuuguaaguuaugaaaugcaacgaaaucuuaguuuagaacaugcuaagacaucgguucuauugcuuaauaaaguugauuuacucugggacgaccuuuuccuuaucuuacaauuuguuuggcauacaucaguggaacacuuucagauccgaaaugugacuuuuggugguaaggcuuaucuugaccacaauucauuugacuacucaaauacuguaaugagaacuauaaaauuggagcauguacauuucagaguguuuuacauucaacaggauaaaaucuauuugcuuuugaccaaaauggacauagaaaaccugacaauaucaaaugcacaaaugccacacaugcuuuucccuaauuauccuacgaaauuccaauauuuaaauuuugccaauaauaucuuaacagacgaguuguuuaaaagaacucuccaacugccucacuugaaaacucucauuuugaauggcaauaaacuggagacacuuucuuuaguaaguugcuuugcuaacaacacacccuuggaacacuuggaucugagucaaaaucuauuacaacauaaaaaugaugaaaauugcucauggccagaaacuguggucaauaugaaucugucauacaauaaauugucugauucugucuucaggugcuugcccaaaaguauucaaauacuugaccuaaauaauaaccaaauccaaacuguaccuaaagagacuauucaucugauggccuuacgagaacuaaauacugcauuuaauuuucuaacugaucucccuggaugcagucauuucaguagacuuucaguucugaacauugaaaugaacuucauucucagcccaucucuggauuuuguucagagcugccaggaaguuaaaacucuaaaugcgggaagaaauccauuccgguguaccugugaauuaaaaaauuucauucagcuugaaacauauucagaggucaugaugguuggauggucagauucauacaccugugaauacccuuuaaaccuaaggggaacuagguuaaaagacguucaucuccacgaauuaucuugcaacacagcucuguugauugucaccauugugguuauuaugcuaguucugggguuggcuguggccuucugcugucuccacuuugaucugcccugguaucucaggaugcuaggucaaugcacacaaacauggcacaggguuaggaaaacaacccaagaacaacucaagagaaauguccgauuccacgcauuuauuucauacagugaacaugauucucugugggugaagaaugaauugauccccaaucuagagaaggaagaugguucuaucuugauuugccuuuaugaaagcuacuuugacccuggcaaaagcauuagugaaaauauuguaagcuucauugagaaaagcuauaaguccaucuuuguuuugucucccaacuuuguccagaaugaguggugccauuaugaauucuacuuugcccaccacaaucucuuccaugaaaauucugaucacauaauucuuaucuuacuggaacccauuccauucuauugcauucccaccagguaucauaaacugaaagcucuccuggaaaaaaaagcauacuuggaauggcccaaggauaggcguaaaugugggcuuuucugggcaaaccuucgagcugcuguuaauguuaauguauuagccaccagagaaauguaugaacugcagacauucacagaguuaaaugaagagucucgagguucuacaaucucucugaugagaacagacugucuauaa

SEQ ID NO: 9468 - RNA, 2436 nt, Artificial Sequence
  derived and/or modified sequence opt1 from TLR10__Homo_sapiens__AAY78484
augcgccugauccggaacaucuacaucuucugcagcaucgugaugaccgccgagggcgacgcccccgagcucccggaggagcgcgagcugaugaccaacugcuccaacaugagccugcggaagguccccgcggaccucacgcccgccaccaccacccuggaccuguccuacaaccuccuguuccagcugcagagcuccgacuuccacagcguguccaagcuccgcgugcugauccugugccacaaccggauccagcagcucgaccugaagacguucgaguucaacaaggagcugcgcuaccucgaccugagcaacaaccggcugaaguccgucaccugguaccuccuggccgggcugcgcuaccucgaccugagcuucaacgacuucgacaccaugcccaucugcgaggaggccggcaacaugucccaccuggagauccucgggcugagcggcgccaagauccagaaguccgacuuccagaagaucgcgcaccuccaccugaacaccguguuccugggguuccggacgcugccgcacuacgaggagggcagccuccccauccugaacaccaccaagcugcacaucgugcuccccauggacaccaacuucuggguccugcugcgcgacggcaucaagacguccaagauccucgagaugaccaacaucgacgggaagucccaguucgugagcuacgagaugcagcggaaccugagccuggagcacgccaagaccuccgugcuccugcugaacaaggucgaccuccugugggacgaccuguuccucauccugcaguucguguggcacaccagcguggagcacuuccagauccgcaacgucacguucggcgggaaggccuaccuggaccacaacagcuucgacuacuccaacaccgugaugcggaccaucaagcucgagcacgugcacuuccgcgucuucuacauccagcaggacaagaucuaccugcugcugaccaagauggacaucgagaaccucacgaucagcaacgcccagaugccccacaugcuguucccgaacuaccccaccaaguuccaguaccugaacuucgcgaacaacauccucaccgacgagcuguucaagcggacccugcagcucccccaccugaagacgcugauccucaacggcaacaagcuggagacccugucccucgugagcugcuucgccaacaacacgccccuggagcaccuggaccucucccagaaccugcugcagcacaagaacgacgagaacugcagcuggccggagaccguggucaacaugaaccucuccuacaacaagcugagcgacuccguguuccgcugccugcccaagagcauccagauccucgaccugaacaacaaccagauccagaccgugcccaaggagaccauccaccugauggcccuccgggagcugaacaccgccuucaacuuccugaccgaccuccccgggugcucccacuucagccgccuguccguccugaacaucgagaugaacuucauccucagcccgucccuggacuucgugcagagcugccaggaggugaagacgcugaacgccggccggaaccccuuccgcugcacgugcgagcucaagaacuucauccagcuggagaccuacuccgaggucaugauggugggcuggagcgacuccuacacgugcgaguacccccugaaccuccgggggacccgccugaaggacguccaccuccacgagcugagcugcaacaccgcgcugcugaucgugaccaucguggucaucaugcucgugcugggccuggccguggccuucugcugccuccacuucgaccugcccugguaccugcgcaugcucgggcagugcacccagaccuggcaccggguccgcaagaccacccaggagcagcugaagcggaacgugcgcuuccacgccuucaucagcuacuccgagcacgacagccugugggugaagaacgagcucaucccgaaccuggagaaggaggacggcuccauccugaucugccucuacgagagcuacuucgaccccggcaaguccaucagcgagaacaucgucuccuucaucgagaaguccuacaagagcaucuucgugcugagccccaacuucgugcagaacgaguggugccacuacgaguucuacuucgcccaccacaaccuguuccacgagaacuccgaccacaucauccucauccugcuggagcccaucccguucuacugcauccccacccgguaccacaagcucaaggcgcugcuggagaagaaggccuaccucgaguggcccaaggaccgccggaagugcgggcuguucugggccaaccugcgcgccgccgucaacgugaacgugcucgcgacccgggagauguacgagcugcagacguucaccgagcugaacgaggagagccgcggcuccaccaucagccucaugcggaccgacugccuguga

SEQ ID NO: 9469 - RNA, 2436 nt, Artificial Sequence
  derived and/or modified sequence opt2 from TLR10__Homo_sapiens__AAY78484
augcgccucauccgcaacaucuacaucuucugcuccaucgucaugaccgccgagggcgacgcccccgagcuccccgaggagcgcgagcucaugaccaacugcuccaacaugucccuccgcaagguccccgccgaccucacccccgccaccaccacccucgaccucuccuacaaccuccucuuccagcuccaguccuccgacuuccacuccgucuccaagcuccgcguccucauccucugccacaaccgcauccagcagcucgaccucaagaccuucgaguucaacaaggagcuccgcuaccucgaccucuccaacaaccgccucaaguccgucaccugguaccuccucgccggccuccgcuaccucgaccucuccuucaacgacuucgacaccaugcccaucugcgaggaggccggcaacaugucccaccucgagauccucggccucuccggcgccaagauccagaaguccgacuuccagaagaucgcccaccuccaccucaacaccgucuuccucggcuuccgcacccucccccacuacgaggagggcucccuccccauccucaacaccaccaagcuccacaucguccuccccauggacaccaacuucuggguccuccuccgcgacggcaucaagaccuccaagauccucgagaugaccaacaucgacggcaagucccaguucgucuccuacgagaugcagcgcaaccucucccucgagcacgccaagaccuccguccuccuccucaacaaggucgaccuccucugggacgaccucuuccucauccuccaguucgucuggcacaccuccgucgagcacuuccagauccgcaacgucaccuucggcggcaaggccuaccucgaccacaacuccuucgacuacuccaacaccgucaugcgcaccaucaagcucgagcacguccacuuccgcgucuucuacauccagcaggacaagaucuaccuccuccucaccaagauggacaucgagaaccucaccaucuccaacgcccagaugccccacaugcucuuccccaacuaccccaccaaguuccaguaccucaacuucgccaacaacauccucaccgacgagcucuucaagcgcacccuccagcucccccaccucaagacccucauccucaacggcaacaagcucgagacccucucccucgucuccugcuucgccaacaacaccccccucgagcaccucgaccucucccagaaccuccuccagcacaagaacgacgagaacugcuccuggcccgagaccgucgucaacaugaaccucuccuacaacaagcucuccgacuccgucuuccgcugccuccccaaguccauccagauccucgaccucaacaacaaccagauccagaccguccccaaggagaccauccaccucauggcccuccgcgagcucaacaccgccuucaacuuccucaccgaccuccccggcugcucccacuucucccgccucuccguccucaacaucgagaugaacuucauccucucccccucccucgacuucguccaguccugccaggaggucaagacccucaacgccggccgcaaccccuuccgcugcaccugcgagcucaagaacuucauccagcucgagaccuacuccgaggucaugauggucggcugguccgacuccuacaccugcgaguacccccucaaccuccgcggcacccgccucaaggacguccaccuccacgagcucuccugcaacaccgcccuccucaucgucaccaucgucgucaucaugcucguccucggccucgccgucgccuucugcugccuccacuucgaccuccccugguaccuccgcaugcucggccagugcacccagaccuggcaccgcguccgcaagaccacccaggagcagcucaagcgcaacguccgcuuccacgccuucaucuccuacuccgagcacgacucccucugggucaagaacgagcucauccccaaccucgagaaggaggacggcuccauccucaucugccucuacgaguccuacuucgaccccggcaaguccaucuccgagaacaucgucuccuucaucgagaaguccuacaaguccaucuucguccucucccccaacuucguccagaacgaguggugccacuacgaguucuacuucgcccaccacaaccucuuccacgagaacuccgaccacaucauccucauccuccucgagcccauccccuucuacugcauccccacccgcuaccacaagcucaaggcccuccucgagaagaaggccuaccucgaguggcccaaggaccgccgcaagugcggccucuucugggccaaccuccgcgccgccgucaacgucaacguccucgccacccgcgagauguacgagcuccagaccuucaccgagcucaacgaggagucccgcggcuccaccaucucccucaugcgcaccgacugccucuga

SEQ ID NO: 9470 - RNA, 2436 nt, Artificial Sequence
  derived and/or modified sequence opt3 from TLR10__Homo_sapiens__AAY78484
augagacugaucaggaacauuuacauauucugcagcaucgugaugaccgccgagggcgacgcucccgaacucccugaggaacgggagcuuaugacaaauuguuccaacaugucucugcgcaaggucccagcagauuugacuccggccacgaccacauuagaccugucauauaaucuacucuuucagcugcaaaguagcgauuuccacuccguuucuaaacuucgagugcugauuuugugccauaaccguauccagcagcucgaccugaagacuuuugaauuuaauaaagagcugagauaccucgauuuaucgaacaauaggcugaagucaguaaccugguaucuuuuggcggggcugcgguaccuagaccucagcuucaacgauuucgacacaaugcccauuugugaggaagcuggaaauaugagucaccuggagauccuuggucuguccggcgccaaaauacagaagucugauuuucaaaagaucgcacauuugcaccucaacaccguguuccugggguuucgcacuuuaccucauuaugaagagggaagccugccaauucucaauacaaccaaacuucacaucguccugcccauggacacgaacuucuggguguugcuaagagauggcauuaagacuuccaaaauccuggagaugaccaauauagacgguaagucacaguuuguuaguuacgaaaugcagaggaaccucagccuggagcacgccaaaacaucugugcuucuguugaauaaggucgaucuccugugggacgacuuauuccugauucuacaguuuguguggcauacuuccguagaacacuuccaaauccggaacguuaccuucgggggaaaggcuuaucucgaucauaacucauuugacuacagcaauacagugaugcgcaccauuaaacuggagcacguccacuuccgaguguuuuacauccagcaggauaagaucuaucuuuugcugacgaaaauggacauugaaaaccucacuauaaguaaugcacagaugccucauaugcuguucccaaacuaccccacaaaguuucaauaucuuaauuucgccaacaauauccugaccgaugaguuguuuaaaagaacucuccagcugccucacuuaaagacacugauucuaaacggcaauaaacucgagacccugucucuuguguccugcuucgcuaacaauacgccauuggaacaucuggaccucagccagaaccuguuacaacacaagaaugaugagaacuguucguggccggaaaccgucguuaauaugaaccugucuuacaacaaacuuuccgacucaguguuuaggugcuugcccaagaguauccagauacucgaucugaauaacaaucagauucagacaguaccuaaggagacuauccaucuaauggcccugcgggaacucaacaccgcguucaauuuucugacagaccuuccaggcuguagccacuucucccguuugucugugcugaacaucgagaugaauuuuauuuuaagccccucacucgauuucguccaaaguugccaggaggugaaaacucugaacgcagggcgcaauccuuucagauguaccugcgaacuuaagaacuuuauccagcuggagacauauuccgaaguuaugauggugggauggagcgacucuuacaccugugaguauccauugaaucucagggguacucggcugaaagacguccaccuacaugaacugucaugcaacacggcccuccugauugugacaauaguaguuaucaugcuuguguugggccuggcugucgccuucugcuguuuacacuuugaucuccccugguaccugcgaaugcuugggcagugcacccaaacuuggcaucgcgugagaaagaccacacaggagcagcugaagaggaauguccgguuccacgcauuuauuaguuacagcgagcacgacucccuaugggugaaaaacgaacucaucccgaaucuggagaaggaagauggaucuaucuugauuugucuguaugagucguacuucgacccuggcaaaagcauauccgagaacaucguuucauuuauugaaaagaguuauaaaucuaucuucguguuaagccccaacuuuguacagaaugaguggugccauuacgaguucuauuuugcucaccauaaccucuuccacgaaaauuccgaucauauuauccugauacuucuggaaccaaucccuuuuuacuguauucccacccgcuaucacaaguugaaggcccuccuggagaaaaaggcguaccuagaguggccaaaagacagaaggaagugcggucuguucugggccaaccuucgugcagcugucaaugugaacguucucgccacucgggaaauguacgagcugcaaacauucacggaauugaaugaggaaucacgagggagcaccaucucucugaugagaacugauuguuuauga

SEQ ID NO: 9471 - RNA, 2436 nt, Artificial Sequence
  derived and/or modified sequence opt4 from TLR10__Homo_sapiens__AAY78484
augagacugaucagaaacaucuacaucuucugcagcaucgugaugaccgccgagggcgacgcccccgagcugcccgaggagagagagcugaugaccaacugcagcaacaugagccugagaaaggugcccgccgaccugacccccgccaccaccacccuggaccugagcuacaaccugcuguuccagcugcagagcagcgacuuccacagcgugagcaagcugagagugcugauccugugccacaacagaauccagcagcuggaccugaagaccuucgaguucaacaaggagcugagauaccuggaccugagcaacaacagacugaagagcgugaccugguaccugcuggccggccugagauaccuggaccugagcuucaacgacuucgacaccaugcccaucugcgaggaggccggcaacaugagccaccuggagauccugggccugagcggcgccaagauccagaagagcgacuuccagaagaucgcccaccugcaccugaacaccguguuccugggcuucagaacccugccccacuacgaggagggcagccugcccauccugaacaccaccaagcugcacaucgugcugcccauggacaccaacuucugggugcugcugagagacggcaucaagaccagcaagauccuggagaugaccaacaucgacggcaagagccaguucgugagcuacgagaugcagagaaaccugagccuggagcacgccaagaccagcgugcugcugcugaacaagguggaccugcugugggacgaccuguuccugauccugcaguucguguggcacaccagcguggagcacuuccagaucagaaacgugaccuucggcggcaaggccuaccuggaccacaacagcuucgacuacagcaacaccgugaugagaaccaucaagcuggagcacgugcacuucagaguguucuacauccagcaggacaagaucuaccugcugcugaccaagauggacaucgagaaccugaccaucagcaacgcccagaugccccacaugcuguuccccaacuaccccaccaaguuccaguaccugaacuucgccaacaacauccugaccgacgagcuguucaagagaacccugcagcugccccaccugaagacccugauccugaacggcaacaagcuggagacccugagccuggugagcugcuucgccaacaacaccccccuggagcaccuggaccugagccagaaccugcugcagcacaagaacgacgagaacugcagcuggcccgagaccguggugaacaugaaccugagcuacaacaagcugagcgacagcguguucagaugccugcccaagagcauccagauccuggaccugaacaacaaccagauccagaccgugcccaaggagaccauccaccugauggcccugagagagcugaacaccgccuucaacuuccugaccgaccugcccggcugcagccacuucagcagacugagcgugcugaacaucgagaugaacuucauccugagccccagccuggacuucgugcagagcugccaggaggugaagacccugaacgccggcagaaaccccuucagaugcaccugcgagcugaagaacuucauccagcuggagaccuacagcgaggugaugauggugggcuggagcgacagcuacaccugcgaguacccccugaaccugagaggcaccagacugaaggacgugcaccugcacgagcugagcugcaacaccgcccugcugaucgugaccaucguggugaucaugcuggugcugggccuggccguggccuucugcugccugcacuucgaccugcccugguaccugagaaugcugggccagugcacccagaccuggcacagagugagaaagaccacccaggagcagcugaagagaaacgugagauuccacgccuucaucagcuacagcgagcacgacagccugugggugaagaacgagcugauccccaaccuggagaaggaggacggcagcauccugaucugccuguacgagagcuacuucgaccccggcaagagcaucagcgagaacaucgugagcuucaucgagaagagcuacaagagcaucuucgugcugagccccaacuucgugcagaacgaguggugccacuacgaguucuacuucgcccaccacaaccuguuccacgagaacagcgaccacaucauccugauccugcuggagcccauccccuucuacugcauccccaccagauaccacaagcugaaggcccugcuggagaagaaggccuaccuggaguggcccaaggacagaagaaagugcggccuguucugggccaaccugagagccgccgugaacgugaacgugcuggccaccagagagauguacgagcugcagaccuucaccgagcugaacgaggagagcagaggcagcaccaucagccugaugagaaccgacugccuguga

SEQ ID NO: 9472 - RNA, 2436 nt, Artificial Sequence
  derived and/or modified sequence opt5 from TLR10__Homo_sapiens__AAY78484
augagacugauccggaacauuuacaucuucugcagcauugugaugaccgccgagggcgacgcucccgaacucccugaggaacgcgagcugaugacaaauuguuccaacaugucucuuagaaaggucccggccgaucugacgcccgcgaccacaacccucgaccugagcuauaaucuucuguuucagcuccaauccucugauuuccacagcguuuccaaacugcgggugcugauccucugccauaaccgcauucagcagcuggaccuuaagacauuugaguucaauaaagagcugagauaccucgaucugucuaacaaucggcuuaagagcgugaccugguaucugcucgcugggcugcgcuaccuggaccucuccuuuaacgauuucgacacaaugccuaucugugaggaagccggaaauaugagccaccuggagauccuuggccugucuggggccaaaauucagaaguccgauuuucaaaagaucgcucaucuccaccugaacaccgucuuccuuggauuuagaacgcugccccauuaugaagagggcagccucccuauucugaauaccacaaaacugcacaucgugcuccccauggacaccaacuucuggguucugcuucgggaugggauuaagacaucuaaaauccuggagaugaccaauauugacggaaagucccaguuugugagcuacgaaaugcagcgcaaccucucucuggagcacgccaaaacguccguccuucugcucaauaagguggaucugcugugggacgaccucuuccugauccuucaguuuguuuggcauacaagcguggaacacuuccaaaucagaaacgucaccuucggcggcaaggcuuaucuggaucauaacuccuuugacuacucuaauacagugaugcggaccauuaaacucgagcacgugcacuuccgcgucuuuuacauccagcaggauaagauuuaucugcugcuuaccaaaauggacaucgaaaaccucacaauuagcaaugcccagaugccucauaugcuguucccgaacuaccccacgaaguuucaauaucugaauuucgcgaacaauauccucaccgaugagcuguuuaaaagaacacuucagcugccucaccucaagacccugauccugaacgggaauaaacuugagacacucucccugguuagcugcuucgccaacaauacgccccuggaacaucucgaccugucucagaaccuucugcaacacaagaaugaugagaacuguuccuggccugaaaccguggugaauaugaaccucagcuacaacaagcugucugacagcgucuuucggugccugcccaaauccauucagauccuugaucucaauaacaaucagauucagacagugccgaaggagaccauccaucugauggcucugcgcgaacucaacaccgccuucaauuuucugacagaccuuccuggauguucucacuucagcagacuguccguucucaacauugagaugaauuuuauccugagccccucucuggauuucgugcaauccugccaggaggucaaaacccuuaacgcuggccggaauccuuucagauguacaugcgaacucaagaacuuuauccagcuggagacguauagcgaagugaugaugguuggguggucugacuccuacaccugugaguauccccugaaucuccgcggaacacggcugaaagacgugcaccuucaugaacugagcugcaacaccgcccuccugauugucacaaucguggucauuaugcuggugcuuggccuggcgguugccuucugcugucuccacuuugaucugcccugguaccucagaaugcuggggcagugcacccaaacguggcaucgcgugcggaagaccacacaggagcagcuuaagagaaauguccgcuuccacgcuuuuaucuccuacucugagcacgacagccugugggugaaaaacgaacucauuccuaaucuggagaaggaagauggauccauccugauuugucuuuaugagucuuacuucgacccgggcaaaagcaucuccgagaacaucguuagcuuuauugaaaagucuuauaaauccaucuucgugcugagccccaacuuuguccagaaugaguggugccauuacgaguucuauuuugcccaccauaaccucuuccacgaaaauucugaucauauuauccugauucuccuggaaccuauccccuuuuacuguaucccuacccgguaucacaaacuuaaggcucugcucgaaaagaaggccuaccuggaguggcccaaagacagacgcaagugcggccuguucugggccaaccuucgggcugcggugaaugugaacguucuggccacaagagaaauguacgagcuccaaaccuucacggaacugaaugaggaaucccgcgggagcacaauuucucucaugcggaccgauugucuguga

SEQ ID NO: 9473 - protein, 811 aa, Artificial Sequence [sequence omitted]

SEQ ID NO: 9474 - RNA, 2436 nt, Artificial Sequence
  TLR10__Homo_sapiens__AAY78485
augagacucaucagaaacauuuacauauuuuguaguauuguuaugacagcagagggugaugcuccagagcugccagaagaaagggaacugaugaccaacugcuccaacaugucucuaagaaagguucccgcagacuugaccccagccacaacgacacuggauuuauccuauaacauccuuuuucaacuccagaguucagauuuucauucugucuccaaacugagaguuuugauucuaugccauaacagaauucaacagcuggaucucaaaaccuuugaauucaacaaggaguuaagauauuuagauuugucuaauaacagacugaagaguguaacuugguauuuacuggcaggucucagguauuuagaucuuucuuuuaaugacuuugacaccaugccuaucugugaggaagcuggcaacaugucacaccuggaaauccuagguuugaguggggcaaaaauacaaaaaucagauuuccagaaaauugcucaucugcaucuaaauacugucuucuuaggauucagaacucuuccucauuaugaagaagguagccugcccaucuuaaacacaacaaaacugcacauuguuuuaccaauggacacaaauuucuggguucuuuugcgugauggaaucaagacuucaaaaauauuagaaaugacaaauauagauggcaaaagccaauuuguaaguuaugaaaugcaacgaaaucuuaguuuagaaaaugcuaagacaucgguucuauugcuuaauaaaguugauuuacucugggacgaccuuuuccuuaucuuacaauuuguuuggcauacaucaguggaacacuuucagauccgaaaugugacuuuuggugguaaggcuuaucuugaccacaauucauuugacuacucaaauacuguaaugagaacuauaaaauuggagcauguacauuucagaguguuuuacauucaacaggauaaaaucuauuugcuuuugaccaaaauggacauagaaaaccugacaauaucaaaugcacaaaugccacacaugcuuuucccgaauuauccuacgaaauuccaauauuuaaauuuugccaauaauaucuuaacagacgaguuguuuaaaagaacuauccaacugccucacuugaaaacucucauuuugaauggcaauaaacuggagacacuuucuuuaguaaguugcuuugcuaacaacacacccuuggaacacuuggaucugagucaaaaucuauuacaacauaaaaaugaugaaaauugcucauggccagaaacuguggucaauaugaaucugucauacaauaaauugucugauucugucuucaggugcuugcccaaaaguauucaaauacuugaccuaaauaauaaccaaauccaaacuguaccuaaagagacuauucaucugauggccuuacgagaacuaaauauugcauuuaauuuucuaacugaucucccuggaugcagucauuucaguagacuuucaguucugaacauugaaaugaacuucauucucagcccaucucuggauuuuguucagagcugccaggaaguuaaaacucuaaaugcgggaagaaauccauuccgguguaccugugaauuaaaaaauuucauucagcuugaaacauauucagaggucaugaugguuggauggucagauucauacaccugugaauacccuuuaaaccuaaggggaacuagguuaaaagacguucaucuccacgaauuaucuugcaacacagcucuguugauugucaccauugugguuauuaugcuaguucugggguuggcuguggccuucugcugucuccacuuugaucugcccugguaucucaggaugcuaggucaaugcacacaaacauggcacaggguuaggaaaacaacccaagaacaacucaagagaaauguccgauuccacgcauuuauuucauacagugaacaugauucucugugggugaagaaugaauugauccccaaucuagagaaggaagaugguucuaucuugauuugccuuuaugaaagcuacuuugacccuggcaaaagcauuagugaaaauauuguaagcuucauugagaaaagcuauaaguccaucuuuguuuugucucccaacuuuguccagaaugaguggugccauuaugaauucuacuuugcccaccacaaucucuuccaugaaaauucugaucauauaauucuuaucuuacuggaacccauuccauucuauugcauucccaccagguaucauaaacugaaagcucuccuggaaaaaaaagcauacuuggaauggcccaaggauaggcguaaaugugggcuuuucugggcaaaccuucgagcugcuauuaauguuaauguauuagccaccagagaaauguaugaacugcagacauucacagaguuaaaugaagagucucgagguucuacaaucucucugaugagaacagauugucuauaa

SEQ ID NO: 9475 - RNA, 2436 nt, Artificial Sequence
  derived and/or modified sequence opt1 from TLR10__Homo_sapiens__AAY78485
augcgccugauccggaacaucuacaucuucugcagcaucgugaugaccgccgagggcgacgcccccgagcucccggaggagcgcgagcugaugaccaacugcuccaacaugagccugcggaagguccccgcggaccucacgcccgccaccaccacccuggaccuguccuacaacauccucuuccagcugcagagcuccgacuuccacagcguguccaagcugcgcgugcucauccugugccacaaccggauccagcagcuggaccucaagacguucgaguucaacaaggagcugcgcuaccuggaccucagcaacaaccggcugaaguccgucaccugguaccugcucgccgggcugcgcuaccuggaccucagcuucaacgacuucgacaccaugcccaucugcgaggaggccggcaacaugucccaccuggagauccuggggcucagcggcgccaagauccagaaguccgacuuccagaagaucgcgcaccuccaccugaacaccguguuccucggguuccggacgcugccgcacuacgaggagggcagccugcccauccucaacaccaccaagcugcacaucgugcugcccauggacaccaacuucuggguccuccugcgcgacggcaucaagacguccaagauccuggagaugaccaacaucgacgggaagucccaguucgugagcuacgagaugcagcggaaccucagccuggagaacgccaagaccuccgugcugcuccugaacaaggucgaccugcucugggacgaccuguuccugauccuccaguucguguggcacaccagcguggagcacuuccagauccgcaacgucacguucggcgggaaggccuaccuggaccacaacagcuucgacuacuccaacaccgugaugcggaccaucaagcuggagcacgugcacuuccgcgucuucuacauccagcaggacaagaucuaccuccugcugaccaagauggacaucgagaaccugacgaucagcaacgcccagaugccccacaugcuguucccgaacuaccccaccaaguuccaguaccugaacuucgcgaacaacauccugaccgacgagcuguucaagcggaccauccagcucccccaccugaagacgcucauccugaacggcaacaagcuggagacccucucccuggugagcugcuucgccaacaacacgccccuggagcaccucgaccugucccagaaccugcuccagcacaagaacgacgagaacugcagcuggccggagaccguggucaacaugaaccuguccuacaacaagcugagcgacuccguguuccgcugccuccccaagagcauccagauccuggaccugaacaacaaccagauccagaccgugcccaaggagaccauccaccucauggcccugcgggagcugaacaucgccuucaacuuccucaccgaccugcccgggugcucccacuucagccgccuguccguccucaacaucgagaugaacuucauccugagcccgucccuggacuucgugcagagcugccaggaggugaagacccucaacgccggccggaaccccuuccgcugcacgugcgagcugaagaacuucauccagcuggagaccuacuccgaggucaugauggugggcuggagcgacuccuacacgugcgaguacccccucaaccugcgggggacccgccugaaggacguccaccuccacgagcugagcugcaacaccgcgcugcucaucgugaccaucguggucaucaugcuggugcugggccucgccguggccuucugcugccugcacuucgaccugcccugguaccuccgcaugcuggggcagugcacccagaccuggcaccggguccgcaagaccacgcaggagcagcugaagcggaacgugcgcuuccacgccuucaucagcuacuccgagcacgacagccucugggugaagaacgagcugaucccgaaccuggagaaggaggacggcuccauccucaucugccuguacgagagcuacuucgaccccggcaaguccaucagcgagaacaucgucuccuucaucgagaaguccuacaagagcaucuucgugcugagccccaacuucgugcagaacgaguggugccacuacgaguucuacuucgcccaccacaaccucuuccacgagaacuccgaccacaucauccugauccugcucgagcccaucccguucuacugcauccccacccgguaccacaagcugaaggcgcugcucgagaagaaggccuaccuggaguggcccaaggaccgccggaagugcgggcuguucugggccaaccuccgcgccgccaucaacgucaacgugcuggcgacccgggagauguacgagcugcagaccuucacggagcucaacgaggagagccgcggcuccaccaucagccugaugcggaccgacugccuguga

SEQ ID NO: 9476 - RNA, 2436 nt, Artificial Sequence
  derived and/or modified sequence opt2 from TLR10__Homo_sapiens__AAY78485
augcgccucauccgcaacaucuacaucuucugcuccaucgucaugaccgccgagggcgacgcccccgagcuccccgaggagcgcgagcucaugaccaacugcuccaacaugucccuccgcaagguccccgccgaccucacccccgccaccaccacccucgaccucuccuacaacauccucuuccagcuccaguccuccgacuuccacuccgucuccaagcuccgcguccucauccucugccacaaccgcauccagcagcucgaccucaagaccuucgaguucaacaaggagcuccgcuaccucgaccucuccaacaaccgccucaaguccgucaccugguaccuccucgccggccuccgcuaccucgaccucuccuucaacgacuucgacaccaugcccaucugcgaggaggccggcaacaugucccaccucgagauccucggccucuccggcgccaagauccagaaguccgacuuccagaagaucgcccaccuccaccucaacaccgucuuccucggcuuccgcacccucccccacuacgaggagggcucccuccccauccucaacaccaccaagcuccacaucguccuccccauggacaccaacuucuggguccuccuccgcgacggcaucaagaccuccaagauccucgagaugaccaacaucgacggcaagucccaguucgucuccuacgagaugcagcgcaaccucucccucgagaacgccaagaccuccguccuccuccucaacaaggucgaccuccucugggacgaccucuuccucauccuccaguucgucuggcacaccuccgucgagcacuuccagauccgcaacgucaccuucggcggcaaggccuaccucgaccacaacuccuucgacuacuccaacaccgucaugcgcaccaucaagcucgagcacguccacuuccgcgucuucuacauccagcaggacaagaucuaccuccuccucaccaagauggacaucgagaaccucaccaucuccaacgcccagaugccccacaugcucuuccccaacuaccccaccaaguuccaguaccucaacuucgccaacaacauccucaccgacgagcucuucaagcgcaccauccagcucccccaccucaagacccucauccucaacggcaacaagcucgagacccucucccucgucuccugcuucgccaacaacaccccccucgagcaccucgaccucucccagaaccuccuccagcacaagaacgacgagaacugcuccuggcccgagaccgucgucaacaugaaccucuccuacaacaagcucuccgacuccgucuuccgcugccuccccaaguccauccagauccucgaccucaacaacaaccagauccagaccguccccaaggagaccauccaccucauggcccuccgcgagcucaacaucgccuucaacuuccucaccgaccuccccggcugcucccacuucucccgccucuccguccucaacaucgagaugaacuucauccucucccccucccucgacuucguccaguccugccaggaggucaagacccucaacgccggccgcaaccccuuccgcugcaccugcgagcucaagaacuucauccagcucgagaccuacuccgaggucaugauggucggcugguccgacuccuacaccugcgaguacccccucaaccuccgcggcacccgccucaaggacguccaccuccacgagcucuccugcaacaccgcccuccucaucgucaccaucgucgucaucaugcucguccucggccucgccgucgccuucugcugccuccacuucgaccuccccugguaccuccgcaugcucggccagugcacccagaccuggcaccgcguccgcaagaccacccaggagcagcucaagcgcaacguccgcuuccacgccuucaucuccuacuccgagcacgacucccucugggucaagaacgagcucauccccaaccucgagaaggaggacggcuccauccucaucugccucuacgaguccuacuucgaccccggcaaguccaucuccgagaacaucgucuccuucaucgagaaguccuacaaguccaucuucguccucucccccaacuucguccagaacgaguggugccacuacgaguucuacuucgcccaccacaaccucuuccacgagaacuccgaccacaucauccucauccuccucgagcccauccccuucuacugcauccccacccgcuaccacaagcucaaggcccuccucgagaagaaggccuaccucgaguggcccaaggaccgccgcaagugcggccucuucugggccaaccuccgcgccgccaucaacgucaacguccucgccacccgcgagauguacgagcuccagaccuucaccgagcucaacgaggagucccgcggcuccaccaucucccucaugcgcaccgacugccucuga

SEQ ID NO: 9477 - RNA, 2436 nt, Artificial Sequence
  derived and/or modified sequence opt3 from TLR10__Homo_sapiens__AAY78485
augagacugaucaggaacauuuacauauucugcagcaucgugaugaccgccgagggcgacgcucccgaacucccugaggaacgggagcuuaugacaaauuguuccaacaugucucugcgcaaggucccagcagauuugacuccggccacgaccacauuagaccugucauauaauauucuauuucagcuccaaaguagcgauuuccacuccguuucuaaacugcgagugcuuauccugugccauaaccguauucagcaguuggaccucaagacuuuugaguucaauaaagaacugagauaccuggaucucucgaacaauagguuaaagucaguaaccugguaucugcuugcgggguugcgguaccuggaccucagcuuuaacgauuucgacacaaugcccaucugugaggaagcuggaaauaugagucaccucgagauacugggucuuuccggcgccaaaauccagaagucugauuuucaaaagauugcacaucugcacuugaacaccguguuccucggguuucgcacucugccucauuaugaagagggaagccuuccaauccugaauacaaccaaacuccacauuguccuucccauggacacgaacuucugggugcuguugagagauggcaucaagacuuccaaaauacuagagaugaccaauauugacgguaagucacaguuuguuaguuacgaaaugcagaggaaccugagccucgagaaugccaaaacaucugugcugcuucugaacaaggucgauuugcucugggacgaccuguucuuaauccugcaguuuguguggcacacuuccguagaacauuuccaaauucggaacguuaccuucgggggaaaggcuuaucuagaucacaauucauuugacuacagcaacacagugaugcgcaccaucaaacucgagcauguccacuuccgaguguuuuacauccagcaggauaagauuuaucugcuuuugacgaaaauggacauagaaaaucugacuaucaguaacgcacagaugccucacaugcuauucccaaauuaccccacaaaguuucaauaucugaacuucgccaauaacauucuuaccgaugagcuguuuaaaagaacuauccaguugccucaucucaagacacugauauuaaauggcaacaaacuggagacccuaucucucguguccugcuucgcuaauaacacgccacuggaacaccuugacuugagccagaaucugcuccaacauaagaacgaugagaauuguucguggccggaaaccgucguuaacaugaaccugucuuacaauaaguuauccgacucaguguuuaggugccugcccaaaaguauucagauccuugauuugaacaauaaccagauccagacaguaccuaaggagacuauucaccucauggcccugcgggaacuaaauaucgcguucaacuuucugaccgaccucccaggcuguagccauuucucccgucugucugugcuuaauauugagaugaacuuuauauugagccccucacuggauuucguccaaaguugccaggaggugaaaacauuaaaugcagggcgcaacccuuucagauguacuugcgaacucaagaauuuuauccagcuggagaccuauuccgaaguuaugauggugggauggagcgacucuuacacaugugaguauccacuuaaccugagggguacccgguugaaagacguccaccuccacgaacugucaugcaauacugcccuacugauugugacgaucguaguuaucaugcucgugcugggccuugcugucgccuucugcuguuugcauuuugaucugcccugguacuuacgaaugcucgggcagugcacacaaaccuggcaccgcgugagaaagacuacccaggagcagcugaagaggaacguccgguuccaugcauuuauuaguuacagcgagcacgacucccuuugggugaaaaaugaacugauaccgaaccuagagaaggaagauggaucuauccucauuugucuguaugagucguacuucgacccuggcaaaagcaucuccgagaacauuguuucauuuaucgaaaagaguuauaaaucuauauucguguugagccccaauuuuguacagaacgaguggugccacuacgaguucuauuuugcucaucacaaucuguuccaugaaaacuccgaucacaucauuuuaauccuccuggaaccaauuccuuuuuacuguauccccacacgcuaucauaaguuaaaggcccuguuggagaaaaaggcguaccucgaguggccaaaagacagaaggaagugcggucuguucugggccaaucuacgugcagcuauaaacgucaaugugcuggccacccgggaaauguacgagcuucaaacuuucacagaacucaacgaggaaucacgagggagcacgauuucucugaugagaaccgauuguuuguga

SEQ ID NO: 9478 - RNA, 2436 nt, Artificial Sequence
  derived and/or modified sequence opt4 from TLR10__Homo_sapiens__AAY78485
augagacugaucagaaacaucuacaucuucugcagcaucgugaugaccgccgagggcgacgcccccgagcugcccgaggagagagagcugaugaccaacugcagcaacaugagccugagaaaggugcccgccgaccugacccccgccaccaccacccuggaccugagcuacaacauccuguuccagcugcagagcagcgacuuccacagcgugagcaagcugagagugcugauccugugccacaacagaauccagcagcuggaccugaagaccuucgaguucaacaaggagcugagauaccuggaccugagcaacaacagacugaagagcgugaccugguaccugcuggccggccugagauaccuggaccugagcuucaacgacuucgacaccaugcccaucugcgaggaggccggcaacaugagccaccuggagauccugggccugagcggcgccaagauccagaagagcgacuuccagaagaucgcccaccugcaccugaacaccguguuccugggcuucagaacccugccccacuacgaggagggcagccugcccauccugaacaccaccaagcugcacaucgugcugcccauggacaccaacuucugggugcugcugagagacggcaucaagaccagcaagauccuggagaugaccaacaucgacggcaagagccaguucgugagcuacgagaugcagagaaaccugagccuggagaacgccaagaccagcgugcugcugcugaacaagguggaccugcugugggacgaccuguuccugauccugcaguucguguggcacaccagcguggagcacuuccagaucagaaacgugaccuucggcggcaaggccuaccuggaccacaacagcuucgacuacagcaacaccgugaugagaaccaucaagcuggagcacgugcacuucagaguguucuacauccagcaggacaagaucuaccugcugcugaccaagauggacaucgagaaccugaccaucagcaacgcccagaugccccacaugcuguuccccaacuaccccaccaaguuccaguaccugaacuucgccaacaacauccugaccgacgagcuguucaagagaaccauccagcugccccaccugaagacccugauccugaacggcaacaagcuggagacccugagccuggugagcugcuucgccaacaacaccccccuggagcaccuggaccugagccagaaccugcugcagcacaagaacgacgagaacugcagcuggcccgagaccguggugaacaugaaccugagcuacaacaagcugagcgacagcguguucagaugccugcccaagagcauccagauccuggaccugaacaacaaccagauccagaccgugcccaaggagaccauccaccugauggcccugagagagcugaacaucgccuucaacuuccugaccgaccugcccggcugcagccacuucagcagacugagcgugcugaacaucgagaugaacuucauccugagccccagccuggacuucgugcagagcugccaggaggugaagacccugaacgccggcagaaaccccuucagaugcaccugcgagcugaagaacuucauccagcuggagaccuacagcgaggugaugauggugggcuggagcgacagcuacaccugcgaguacccccugaaccugagaggcaccagacugaaggacgugcaccugcacgagcugagcugcaacaccgcccugcugaucgugaccaucguggugaucaugcuggugcugggccuggccguggccuucugcugccugcacuucgaccugcccugguaccugagaaugcugggccagugcacccagaccuggcacagagugagaaagaccacccaggagcagcugaagagaaacgugagauuccacgccuucaucagcuacagcgagcacgacagccugugggugaagaacgagcugauccccaaccuggagaaggaggacggcagcauccugaucugccuguacgagagcuacuucgaccccggcaagagcaucagcgagaacaucgugagcuucaucgagaagagcuacaagagcaucuucgugcugagccccaacuucgugcagaacgaguggugccacuacgaguucuacuucgcccaccacaaccuguuccacgagaacagcgaccacaucauccugauccugcuggagcccauccccuucuacugcauccccaccagauaccacaagcugaaggcccugcuggagaagaaggccuaccuggaguggcccaaggacagaagaaagugcggccuguucugggccaaccugagagccgccaucaacgugaacgugcuggccaccagagagauguacgagcugcagaccuucaccgagcugaacgaggagagcagaggcagcaccaucagccugaugagaaccgacugccuguga

SEQ ID NO: 9479 - RNA, 2436 nt, Artificial Sequence
  derived and/or modified sequence opt5 from TLR10__Homo_sapiens__AAY78485
augagacugauccggaacauuuacaucuucugcagcauugugaugaccgccgagggcgacgcucccgaacucccugaggaacgcgagcugaugacaaauuguuccaacaugucucuuagaaaggucccggccgaucugacgcccgcgaccacaacccucgaccugagcuauaauauccuuuuucagcugcaauccucugauuuccacagcguuuccaaacuccgggugcugauucugugccauaaccgcauccagcagcucgaccugaagacauuugaguucaauaaagaacuuagauaccuggaucucucuaacaaucggcucaagagcgugaccugguaucuucuggcugggcuccgcuaccuggaccuguccuuuaacgauuucgacacaaugccuaucugugaggaagccggaaauaugagccaccucgagauucugggccuuucuggggccaaaauccagaaguccgauuuucaaaagauugcucaucugcaccucaacaccgucuuccugggauuuagaacgcuuccccauuaugaagagggcagccugccuauccucaauaccacaaaacugcacauugugcugcccauggacaccaacuucuggguucuccugcgggaugggaucaagacaucuaaaauucuugagaugaccaauaucgacggaaagucccaguuugugagcuacgaaaugcagcgcaaccugucucucgagaaugccaaaacguccguccugcuucugaacaagguggaucuccugugggacgaccuguuccucauccugcaguuuguuuggcacacaagcguggaacauuuccaaauuagaaacgucaccuucggcggcaaggcuuaucuugaucacaauuccuuugacuacucuaacacagugaugcggaccaucaaacuggagcaugugcacuuccgcgucuuuuacauucagcaggauaagaucuaucuccugcugaccaaaauggacauugaaaaucuuacaaucagcaacgcccagaugccucacaugcuguucccgaauuaccccacgaaguuucaauaucugaacuucgcgaauaacauccugaccgaugagcucuuuaaaagaacaauucagcugccucaucuuaagacccugauccucaaugggaacaaacuggagacacugucccuuguuagcugcuucgccaauaacacgccccucgaacaccuggaccugucucagaaucuccugcaacauaagaacgaugagaauuguuccuggccugaaaccguggugaacaugaaccuuagcuacaauaagcugucugacagcgucuuucggugccuccccaaauccauucagauccuggaucugaacaauaaccagauucagacagugccgaaggagaccauccaccuuauggcucuccgcgaacugaauaucgccuucaacuuucugaccgaccucccuggauguucucauuucagcagacuguccguucuuaauauugagaugaacuuuauccugagccccucucucgauuucgugcaauccugccaggaggucaaaacacugaaugcuggccggaacccuuucagauguaccugcgaacugaagaauuuuauucagcuugagacauauagcgaagugaugaugguuggguggucugacuccuacacgugugaguauccccucaaccugcgcggaacccggcugaaagacgugcaccuccacgaacugagcugcaauacagcccuucugaucgucaccauuguggucaucaugcucgugcugggccuggcgguugccuucugcugucuucauuuugaucugcccugguaccucagaaugcuggggcagugcacacaaaccuggcaccgcgugcggaagacgacccaggagcagcucaagagaaacguccgcuuccaugcuuuuauuuccuacucugagcacgacagccugugggugaaaaaugaacuuaucccuaaccuggagaaggaagauggauccauccucauuugucuguaugagucuuacuucgacccgggcaaaagcaucuccgagaacauuguuagcuuuaucgaaaagucuuauaaauccauuuucgugcugagccccaauuuuguccagaacgaguggugccacuacgaguucuauuuugcccaucacaaucuuuuccaugaaaacucugaucacaucauccugauucuccuggaaccuauccccuuuuacuguauuccuacacgguaucauaagcucaaggcucugcuugagaaaaaggccuaccuggaguggcccaaagacagacgcaagugcggccucuucugggccaaucugcgggcugcgaucaacgugaaugugcuggccaccagagaaauguacgagcuucaaacauucaccgaacugaacgaggaaucccgcgggagcacgauuucucucaugcggacagauugucuguga

SEQ ID NO: 9480 - protein, 811 aa, Artificial Sequence [sequence omitted]

SEQ ID NO: 9481 - RNA, 2436 nt, Artificial Sequence
  TLR10__Homo_sapiens__AAY78486
augagacucaucagaaacauuuacauauuuuguaguauuguuaugacagcagagggugaugcuccagagcugccagaagaaagggaacugaugaccaacugcuccaacaugucucuaagaaagguucccgcagacuugaccccagccacaacgacacuggauuuauccuauaaccuccuuuuucaacuccagaguucagauuuucauucugucuccaaacugagaguuuugauucuaugccauaacagaauucaacagcuggaucucaaaaccuuugaauucaacaaggaguuaagauauuuagauuugucuaauaacagacugaagaguguaacuugguauuuacuggcaggucucagguauuuagaucuuucuuuuaaugacuuugacaccaugccuaucugugaggaagcuggcaacaugucacaccuggaaauccuagguuugaguggggcaaaaauacaaaaaucagauuuccagaaaauugcucaucugcaucuaaauacugucuucuuaggauucagaacucuuccucauuaugaagaagguagccugcccaucuuaaacacaacaaaacugcacauuguuuuaccaauggacacaaauuucuggguucuuuugcgugauggaaucaagacuucaaaaauauuagaaaugacaaauauagauggcaaaagccaauuuguaaguuaugaaaugcaacgaaaucuuaguuuagaaaaugcuaagacaucgguucuauugcuuaauaaaguugauuuacucugggacgaccuuuuccuuaucuuacaauuuguuuggcauacaucaguggaacacuuucagauccgaaaugugacuuuuggugguaaggcuuaucuugaccacaauucauuugacuacucaaauacuguaaugagaacuauaaaauuggagcauguacauuucagaguguuuuacauucaacaggauaaaaucuauuugcuuuugaccaaaauggacauagaaaaccugacaauaucaaaugcacaaaugccacacaugcuuuucccgaauuauccuacgaaauuccaauauuuaaauuuugccaauaauaucuuaacagacgaguuguuuaaaagaacuauccaacugccucacuugaaaacucucauuuugaauggcaauaaacuggagacacuuucuuuaguaaguugcuuugcuaacaacacacccuuggaacacuuggaucugagucaaaaucuauuacaacauaaaaaugaugaaaauugcucauggccagaaacuguggucaauaugaaucugucauacaauaaauugucugauucugucuucaggugcuugcccaaaaguauucaaauacuugaccuaaauaauaaccaaauccaaacuguaccuaaagagacuauucaucugauggccuuacgagaacuaaauauugcauuuaauuuucuaacugaucucccuggaugcagucauuucaguagacuuucaguucugaacauugaaaugaacuucauucucagcccaucucuggauuuuguucagagcugccaggaaguuaaaacucuaaaugcgggaagaaauccauuccgguguaccugugaauuaaaaaauuucauucagcuugaaacauauucagaggucaugaugguuggauggucagauucauacaccugugaauacccuuuaaaccuaaggggaacuagguuaaaagacguucaucuccacgaauuaucuugcaacacagcucuguugauugucaccauugugguuauuaugcuaguucugggguuggcuguggccuucugcugucuccacuuugaucugcccugguaucucaggaugcuaggucaaugcacacaaacauggcacaggguuaggaaaacaacccaagaacaacucaagagaaauguccgauuccacgcauuuauuucauacagugaacaugauucucugugggugaagaaugaauugauccccaaucuagagaaggaagaugguucuaucuugauuugccuuuaugaaagcuacuuugacccuggcaaaagcauuagugaaaauauuguaagcuucauugagaaaagcuauaaguccaucuuuguuuugucucccaacuuuguccagaaugaguggugccauuaugaauucuacuuugcccaccacaaucucuuccaugaaaauucugaucauauaauucuuaucuuacuggaacccauuccauucuauugcauucccaccagguaucauaaacugaaagcucuccuggaaaaaaaagcauacuuggaauggcccaaggauaggcguaaaugugggcuuuucugggcaaaccuucgagcugcuauuaauguuaauguauuagccaccagagaaauguaugaacugcagacauucacagaguuaaaugaagagucucaagguucuacaaucucucugaugagaacagauugucuauaa

SEQ ID NO: 9482 - RNA, 2436 nt, Artificial Sequence
  derived and/or modified sequence opt1 from TLR10__Homo_sapiens__AAY78486
augcgccugauccggaacaucuacaucuucugcagcaucgugaugaccgccgagggcgacgcccccgagcucccggaggagcgcgagcugaugaccaacugcuccaacaugagccugcggaagguccccgcggaccucacgcccgccaccaccacccuggaccuguccuacaaccuccuguuccagcugcagagcuccgacuuccacagcguguccaagcuccgcgugcugauccugugccacaaccggauccagcagcucgaccugaagacguucgaguucaacaaggagcugcgcuaccucgaccugagcaacaaccggcugaaguccgucaccugguaccuccuggccgggcugcgcuaccucgaccugagcuucaacgacuucgacaccaugcccaucugcgaggaggccggcaacaugucccaccuggagauccucgggcugagcggcgccaagauccagaaguccgacuuccagaagaucgcgcaccuccaccucaacaccguguuccugggguuccggacgcugccgcacuacgaggagggcagccuccccauccugaacaccaccaagcugcacaucgugcuccccauggacaccaacuucuggguccugcugcgcgacggcaucaagacguccaagauccucgagaugaccaacaucgacgggaagucccaguucgugagcuacgagaugcagcggaaccugagccuggagaacgccaagaccuccgugcuccugcugaacaaggucgaccuccugugggacgaccuguuccucauccugcaguucguguggcacaccagcguggagcacuuccagauccgcaacgucacguucggcgggaaggccuaccuggaccacaacagcuucgacuacuccaacaccgugaugcggaccaucaagcucgagcacgugcacuuccgcgucuucuacauccagcaggacaagaucuaccugcugcugaccaagauggacaucgagaaccucacgaucagcaacgcccagaugccccacaugcuguucccgaacuaccccaccaaguuccaguaccugaacuucgcgaacaacauccucaccgacgagcuguucaagcggaccauccagcugccccaccucaagacgcugauccugaacggcaacaagcucgagacccugucccuggugagcugcuucgccaacaacacgccccucgagcaccuggaccugucccagaaccuccugcagcacaagaacgacgagaacugcagcuggccggagaccguggucaacaugaaccuguccuacaacaagcucagcgacuccguguuccgcugccugcccaagagcauccagauccuggaccucaacaacaaccagauccagaccgugcccaaggagaccauccaccugauggcccugcgggagcucaacaucgccuucaacuuccugaccgaccugcccgggugcucccacuucagccgccucuccguccugaacaucgagaugaacuucauccugagcccgucccucgacuucgugcagagcugccaggaggugaagacccugaacgccggccggaaccccuuccgcugcacgugcgagcugaagaacuucauccagcucgagaccuacuccgaggucaugauggugggcuggagcgacuccuacacgugcgaguacccccugaaccugcgggggacccgccucaaggacguccaccuccacgagcugagcugcaacaccgcgcugcugaucgugaccaucguggucaucaugcuggugcucggccuggccguggccuucugcugccugcacuucgaccuccccugguaccugcgcaugcuggggcagugcacccagaccuggcaccggguccgcaagaccacgcaggagcagcucaagcggaacgugcgcuuccacgccuucaucagcuacuccgagcacgacagccugugggugaagaacgagcugaucccgaaccucgagaaggaggacggcuccauccugaucugccuguacgagagcuacuucgaccccggcaaguccaucagcgagaacaucgucuccuucaucgagaaguccuacaagagcaucuucgugcucagccccaacuucgugcagaacgaguggugccacuacgaguucuacuucgcccaccacaaccuguuccacgagaacuccgaccacaucauccugauccuccuggagcccaucccguucuacugcauccccacccgguaccacaagcugaaggcgcuccuggagaagaaggccuaccuggaguggcccaaggaccgccggaagugcgggcuguucugggccaaccugcgcgccgccaucaacgucaacgugcuggcgacccgggagauguacgagcuccagaccuucacggagcugaacgaggagagccagggcuccaccaucagccugaugcgcaccgacugccucuga

SEQ ID NO: 9483 - RNA, 2436 nt, Artificial Sequence
  derived and/or modified sequence opt2 from TLR10__Homo_sapiens__AAY78486
augcgccucauccgcaacaucuacaucuucugcuccaucgucaugaccgccgagggcgacgcccccgagcuccccgaggagcgcgagcucaugaccaacugcuccaacaugucccuccgcaagguccccgccgaccucacccccgccaccaccacccucgaccucuccuacaaccuccucuuccagcuccaguccuccgacuuccacuccgucuccaagcuccgcguccucauccucugccacaaccgcauccagcagcucgaccucaagaccuucgaguucaacaaggagcuccgcuaccucgaccucuccaacaaccgccucaaguccgucaccugguaccuccucgccggccuccgcuaccucgaccucuccuucaacgacuucgacaccaugcccaucugcgaggaggccggcaacaugucccaccucgagauccucggccucuccggcgccaagauccagaaguccgacuuccagaagaucgcccaccuccaccucaacaccgucuuccucggcuuccgcacccucccccacuacgaggagggcucccuccccauccucaacaccaccaagcuccacaucguccuccccauggacaccaacuucuggguccuccuccgcgacggcaucaagaccuccaagauccucgagaugaccaacaucgacggcaagucccaguucgucuccuacgagaugcagcgcaaccucucccucgagaacgccaagaccuccguccuccuccucaacaaggucgaccuccucugggacgaccucuuccucauccuccaguucgucuggcacaccuccgucgagcacuuccagauccgcaacgucaccuucggcggcaaggccuaccucgaccacaacuccuucgacuacuccaacaccgucaugcgcaccaucaagcucgagcacguccacuuccgcgucuucuacauccagcaggacaagaucuaccuccuccucaccaagauggacaucgagaaccucaccaucuccaacgcccagaugccccacaugcucuuccccaacuaccccaccaaguuccaguaccucaacuucgccaacaacauccucaccgacgagcucuucaagcgcaccauccagcucccccaccucaagacccucauccucaacggcaacaagcucgagacccucucccucgucuccugcuucgccaacaacaccccccucgagcaccucgaccucucccagaaccuccuccagcacaagaacgacgagaacugcuccuggcccgagaccgucgucaacaugaaccucuccuacaacaagcucuccgacuccgucuuccgcugccuccccaaguccauccagauccucgaccucaacaacaaccagauccagaccguccccaaggagaccauccaccucauggcccuccgcgagcucaacaucgccuucaacuuccucaccgaccuccccggcugcucccacuucucccgccucuccguccucaacaucgagaugaacuucauccucucccccucccucgacuucguccaguccugccaggaggucaagacccucaacgccggccgcaaccccuuccgcugcaccugcgagcucaagaacuucauccagcucgagaccuacuccgaggucaugauggucggcugguccgacuccuacaccugcgaguacccccucaaccuccgcggcacccgccucaaggacguccaccuccacgagcucuccugcaacaccgcccuccucaucgucaccaucgucgucaucaugcucguccucggccucgccgucgccuucugcugccuccacuucgaccuccccugguaccuccgcaugcucggccagugcacccagaccuggcaccgcguccgcaagaccacccaggagcagcucaagcgcaacguccgcuuccacgccuucaucuccuacuccgagcacgacucccucugggucaagaacgagcucauccccaaccucgagaaggaggacggcuccauccucaucugccucuacgaguccuacuucgaccccggcaaguccaucuccgagaacaucgucuccuucaucgagaaguccuacaaguccaucuucguccucucccccaacuucguccagaacgaguggugccacuacgaguucuacuucgcccaccacaaccucuuccacgagaacuccgaccacaucauccucauccuccucgagcccauccccuucuacugcauccccacccgcuaccacaagcucaaggcccuccucgagaagaaggccuaccucgaguggcccaaggaccgccgcaagugcggccucuucugggccaaccuccgcgccgccaucaacgucaacguccucgccacccgcgagauguacgagcuccagaccuucaccgagcucaacgaggagucccagggcuccaccaucucccucaugcgcaccgacugccucuga

SEQ ID NO: 9484 - RNA, 2436 nt, Artificial Sequence
  derived and/or modified sequence opt3 from TLR10__Homo_sapiens__AAY78486
augagacugaucaggaacauuuacauauucugcagcaucgugaugaccgccgagggcgacgcucccgaacucccugaggaacgggagcuuaugacaaauuguuccaacaugucucugcgcaaggucccagcagauuugacuccggccacgaccacauuagaccugucauauaaucuacucuuucagcugcaaaguagcgauuuccacuccguuucuaaacuucgagugcugauuuugugccauaaccguauccagcagcucgaccugaagacuuuugaguucaauaaagaacugagauaccucgauuuaucgaacaauaggcugaagucaguaaccugguaucuuuuggcggggcugcgguaccuagaccucagcuuuaacgauuucgacacaaugcccauuugugaggaagcuggaaauaugagucaccuggagauccuuggucuguccggcgccaaaauacagaagucugauuuucaaaagaucgcacauuugcaccucaacaccguguuccugggguuucgcacuuuaccucauuaugaagagggaagccugccaauucucaauacaaccaaacuucacaucguccugcccauggacacgaacuucuggguguugcuaagagauggcauuaagacuuccaaaauccuggagaugaccaauauagacgguaagucacaguuuguuaguuacgaaaugcagaggaaccucagccuggagaaugccaaaacaucugugcuucuguugaacaaggucgaucuccugugggacgacuuauuccugauucuacaguuuguguggcacacuuccguagaacauuuccaaauccggaacguuaccuucgggggaaaggcuuaucucgaucacaauucauuugacuacagcaacacagugaugcgcaccauuaaacuggagcauguccacuuccgaguguuuuacauccagcaggauaagaucuaucuuuugcugacgaaaauggacauugaaaaucucacuauaaguaacgcacagaugccucacaugcuguucccaaauuaccccacaaaguuucaauaucuuaacuucgccaauaacauccugaccgaugaguuguuuaaaagaacuauucagcucccucaucugaagacauuaauccugaauggcaacaaacuagagacccucucucugguguccugcuucgcuaauaacacgccacuugaacacuuggaccugagccagaaucuccugcaacauaagaacgaugagaauuguucguggccggaaaccgucguuaacaugaacuuaucuuacaauaagcuguccgacucaguguuuaggugccuucccaaaaguauacagauuuuggaucucaacaauaaccagauccagacaguaccuaaggagacuauccaccugauggcccuacgggaacugaauauugcguucaacuuucucaccgaccugccaggcuguagccauuucucccgucuuucuguguugaauaucgagaugaacuuuauucugagccccucauuagauuucguccaaaguugccaggaggugaaaacacucaaugcagggcgcaacccuuucagauguacuugcgaacugaagaauuuuauacagcuugagaccuauuccgaaguuaugauggugggauggagcgacucuuacacaugugaguauccacugaacuugagggguacccggcucaaagacguccaucugcacgaacuaucaugcaauacugcccugcucaucgugacgauuguaguuaucaugcuggugcuuggcuuggcugucgccuucugcugucugcacuuugauuuacccugguaccuccgaaugcuggggcagugcacacaaaccuggcaccgcgugagaaagacuacccaggagcagcuuaagaggaacguccgguuccaugcauuuaucaguuacagcgagcacgacucccugugggugaaaaaugaacuaauuccgaaccucgagaaggaagauggaucuauacugaucuguuuguaugagucguacuucgacccuggcaaaagcauuuccgagaacaucguuucauuuauugaaaagaguuauaaaucuaucuucgugcugagccccaauuuuguacagaacgaguggugccacuacgaguucuauuuugcucaucacaauuuauuccaugaaaacuccgaucacauaauccucauucugcuugaaccaaucccuuuuuacuguauucccacacgcuaucauaagcugaaggccuugcucgagaaaaaggcguaccuggaguggccaaaagacagaaggaagugcggucuauucugggccaaucugcgugcagcuaucaacgucaaugugcuugccacccgggaaauguacgagcuccaaacuuucacagaacugaacgaggaaucacaggggagcacgauaucuuugaugcgaaccgauugucuguga

SEQ ID NO: 9485 - RNA, 2436 nt, Artificial Sequence
  derived and/or modified sequence opt4 from TLR10__Homo_sapiens__AAY78486
augagacugaucagaaacaucuacaucuucugcagcaucgugaugaccgccgagggcgacgcccccgagcugcccgaggagagagagcugaugaccaacugcagcaacaugagccugagaaaggugcccgccgaccugacccccgccaccaccacccuggaccugagcuacaaccugcuguuccagcugcagagcagcgacuuccacagcgugagcaagcugagagugcugauccugugccacaacagaauccagcagcuggaccugaagaccuucgaguucaacaaggagcugagauaccuggaccugagcaacaacagacugaagagcgugaccugguaccugcuggccggccugagauaccuggaccugagcuucaacgacuucgacaccaugcccaucugcgaggaggccggcaacaugagccaccuggagauccugggccugagcggcgccaagauccagaagagcgacuuccagaagaucgcccaccugcaccugaacaccguguuccugggcuucagaacccugccccacuacgaggagggcagccugcccauccugaacaccaccaagcugcacaucgugcugcccauggacaccaacuucugggugcugcugagagacggcaucaagaccagcaagauccuggagaugaccaacaucgacggcaagagccaguucgugagcuacgagaugcagagaaaccugagccuggagaacgccaagaccagcgugcugcugcugaacaagguggaccugcugugggacgaccuguuccugauccugcaguucguguggcacaccagcguggagcacuuccagaucagaaacgugaccuucggcggcaaggccuaccuggaccacaacagcuucgacuacagcaacaccgugaugagaaccaucaagcuggagcacgugcacuucagaguguucuacauccagcaggacaagaucuaccugcugcugaccaagauggacaucgagaaccugaccaucagcaacgcccagaugccccacaugcuguuccccaacuaccccaccaaguuccaguaccugaacuucgccaacaacauccugaccgacgagcuguucaagagaaccauccagcugccccaccugaagacccugauccugaacggcaacaagcuggagacccugagccuggugagcugcuucgccaacaacaccccccuggagcaccuggaccugagccagaaccugcugcagcacaagaacgacgagaacugcagcuggcccgagaccguggugaacaugaaccugagcuacaacaagcugagcgacagcguguucagaugccugcccaagagcauccagauccuggaccugaacaacaaccagauccagaccgugcccaaggagaccauccaccugauggcccugagagagcugaacaucgccuucaacuuccugaccgaccugcccggcugcagccacuucagcagacugagcgugcugaacaucgagaugaacuucauccugagccccagccuggacuucgugcagagcugccaggaggugaagacccugaacgccggcagaaaccccuucagaugcaccugcgagcugaagaacuucauccagcuggagaccuacagcgaggugaugauggugggcuggagcgacagcuacaccugcgaguacccccugaaccugagaggcaccagacugaaggacgugcaccugcacgagcugagcugcaacaccgcccugcugaucgugaccaucguggugaucaugcuggugcugggccuggccguggccuucugcugccugcacuucgaccugcccugguaccugagaaugcugggccagugcacccagaccuggcacagagugagaaagaccacccaggagcagcugaagagaaacgugagauuccacgccuucaucagcuacagcgagcacgacagccugugggugaagaacgagcugauccccaaccuggagaaggaggacggcagcauccugaucugccuguacgagagcuacuucgaccccggcaagagcaucagcgagaacaucgugagcuucaucgagaagagcuacaagagcaucuucgugcugagccccaacuucgugcagaacgaguggugccacuacgaguucuacuucgcccaccacaaccuguuccacgagaacagcgaccacaucauccugauccugcuggagcccauccccuucuacugcauccccaccagauaccacaagcugaaggcccugcuggagaagaaggccuaccuggaguggcccaaggacagaagaaagugcggccuguucugggccaaccugagagccgccaucaacgugaacgugcuggccaccagagagauguacgagcugcagaccuucaccgagcugaacgaggagagccagggcagcaccaucagccugaugagaaccgacugccuguga

SEQ ID NO: 9486 - RNA, 2436 nt, Artificial Sequence
  derived and/or modified sequence opt5 from TLR10__Homo_sapiens__AAY78486
augagacugauccggaacauuuacaucuucugcagcauugugaugaccgccgagggcgacgcucccgaacucccugaggaacgcgagcugaugacaaauuguuccaacaugucucuuagaaaggucccggccgaucugacgcccgcgaccacaacccucgaccugagcuauaaucuucuguuucagcuccaauccucugauuuccacagcguuuccaaacugcgggugcugauccucugccauaaccgcauucagcagcuggaccuuaagacauuugaguucaauaaagaacugagauaccucgaucugucuaacaaucggcuuaagagcgugaccugguaucugcucgcugggcugcgcuaccuggaccucuccuuuaacgauuucgacacaaugccuaucugugaggaagccggaaauaugagccaccuggagauccuuggccugucuggggccaaaauucagaaguccgauuuucaaaagaucgcucaucuccaccugaacaccgucuuccuuggauuuagaacgcugccccauuaugaagagggcagccucccuauucugaauaccacaaaacugcacaucgugcuccccauggacaccaacuucuggguucugcuucgggaugggauuaagacaucuaaaauccuggagaugaccaauauugacggaaagucccaguuugugagcuacgaaaugcagcgcaaccucucucuggagaaugccaaaacguccguccuucugcucaacaagguggaucugcugugggacgaccucuuccugauccuucaguuuguuuggcacacaagcguggaacauuuccaaaucagaaacgucaccuucggcggcaaggcuuaucuggaucacaauuccuuugacuacucuaacacagugaugcggaccauuaaacucgagcaugugcacuuccgcgucuuuuacauccagcaggauaagauuuaucugcugcuuaccaaaauggacaucgaaaaucucacaauuagcaacgcccagaugccucacaugcuguucccgaauuaccccacgaaguuucaauaucugaacuucgcgaauaacauccucaccgaugagcuguuuaaaagaacaauccagcuuccucaucugaagacccucauucugaaugggaacaaacuggagacacuuucccucguuagcugcuucgccaauaacacgccccuggaacaccuggaccucucucagaaucugcuucaacauaagaacgaugagaauuguuccuggccugaaaccguggugaacaugaaccugagcuacaauaagcucucugacagcgucuuucggugccugcccaaauccauccagauucuggaucuuaacaauaaccagauccagacagugccgaaggagaccauucaccucauggcucugcgcgaacugaauaucgccuucaacuuucucaccgaccugccuggauguucucauuucagcagacuuuccguucugaauaucgagaugaacuuuauucucagccccucucuggauuucgugcaauccugccaggaggucaaaacacugaaugcuggccggaacccuuucagauguaccugcgaacuuaagaauuuuauccagcucgagacauauagcgaagugaugaugguuggguggucugacuccuacacgugugaguauccccugaaccugcgcggaacccggcucaaagacgugcaccuucacgaacuuagcugcaauacagcccugcucauugucaccaucguggucauuaugcuggugcugggccuugcgguugccuucugcugucugcauuuugaucuccccugguaccugagaaugcucgggcagugcacacaaaccuggcaccgcgugcggaagacgacccaggagcagcugaagagaaacguccgcuuccaugcuuuuaucuccuacucugagcacgacagccuuugggugaaaaaugaacugauuccuaaccucgagaaggaagauggauccauccugaucugucuguaugagucuuacuucgacccgggcaaaagcauuuccgagaacaucguuagcuuuauugaaaagucuuauaaauccaucuucgugcuuagccccaauuuuguccagaacgaguggugccacuacgaguucuauuuugcccaucacaaucuguuccaugaaaacucugaucacauuauccucauccugcucgaaccuauucccuuuuacuguaucccuacacgguaucauaagcugaaggcucugcuggagaaaaaggccuaccucgaguggcccaaagacagacgcaagugcggccuguucugggccaaucugcgggcugcgauuaacgugaaugugcuugccaccagagaaauguacgagcugcaaacauucaccgaacucaacgaggaaucccaggggagcacgaucucucugaugcgcacagauugucucuga

SEQ ID NO: 9487 - protein, 811 aa, Artificial Sequence [sequence omitted]

SEQ ID NO: 9488 - RNA, 2436 nt, Artificial Sequence
  TLR10__Homo_sapiens__AAY78487
augagacucaucagaaacauuuacauauuuuguaguauaguuaugacagcagagggugaugcuccagagcugccagaagaaagggaacugaugaccaacugcuccaacaugucucuaagaaagguucccgcagacuugaccccagccacaacaacacuggauuuauccuauaaccuccuuuuucaacuccagaguucagauuuucauucugucuccaaacugagaguuuugauucuaugccauaacagaauucaacagcuggaucucaaaaccuuugaauucaacaaggaguuaagauauuuagauuugucuaauaacagacugaagaguguaacuugguauuuacuggcaggucucagguauuuagaucuuucuuuuaaugacuuugacaccaugccuaucugugaggaagcuggcaacaugucacaccuggaaauccuagguuugaguggggcaaaaauacaaaaaucagauuuccagaaaauuucucaucugcaucuaaauacugucuucuuaggauucagaacucuuccucauuaugaagaagguagccugcccaucuuaaacacaacaaaacugcacauuguuuuaccaauggacacaaauuucuggguucuuuugcgugauggaaucaagacuucaaaaauauuagaaaugacaaauauagauggcaaaagccaauuuguaaguuaugaaaugcaacgaaaucuuaguuuagaacaugcuaagacaucgguucuauugcuuaauaaaguugauuuacucugggacgaccuuuuccuuaucuuacaauuuguuuggcauacaucaguggaacacuuucagauccgaaaugugacuuuuggugguaaggcuuaucuugaccacaauucauuugacuacucaaauacuauaaugagaacuauaaaauuggagcauguacauuucagaguguuuuacauucaacaggauaaaaucuauuugcuuuugaccaaaauggacauagaaaaccugacaauaucaaaugcacaaaugccacacaugcuuuucccuaauuauccuacgaaauuccaauauuuaaauuuugccaauaauaucuuaacagacgaguuguuuaaaagaacucuccaacugccucacuugaaaacucucauuuugaauggcaauaaacuggagacacuuucuuuaguaaguugcuuugcuaacaacacacccuuggaacacuuggaucugagucaaaaucuauuacaacauaaaaaugaugaaaauugcucauggccagaaacuguggucaauaugaaucugucauacaauaaauugucugauucugucuucaggugcuugcccaaaaguauucaaauacuugaccuaaauaauaaccaaauccaaacuguaccuaaagagacuauucaucugauggccuuacgagaacuaaauauugcauuuaauuuucuaacugaucucccuggaugcagucauuucaguagacuuucaguucugaacauugaaaugaacuucauucucagcccaucucuggauuuuguucagagcugccaggaaguuaaaacucuaaaugcgggaagaaauccauuccgguguaccugugaauuaaaaaauuucauucagcuugaaacauauucagaggucaugaugguuggauggucagauucauacaccugugaauacccuuuaaaccuaaggggaacuagguuaaaagacguucaucuccacgaauuaucuugcaacacagcucuguugauugucaccauugugguuauuaugcuaguucugggguuggcuguggccuucugcugucuccacuuugaucugcccugguaucucaggaugcuaggucaaugcacacaaacauggcacaggguuaggaaaacaacccaagaacaacucaagagaaauguccgauuccacgcauuuauuucauacagugaacaugauucucugugggugaagaaugaauugauccccaaucuagagaaggaagaugguucuaucuugauuugccuuuaugaaagcuacuuugacccuggcaaaagcauuagugaaaauauuguaagcuucauugagaaaagcuauaaguccaucuuuguuuugucucccaacuuuguccagaaugaguggugccauuaugaauucuacuuugcccaccacaaucucuuccaugaaaauucugaucacauaauucuuaucuuacuggaacccauuccauucuauugcauucccaccagguaucauaaacugaaagcucuccuggaaaaaaaagcauacuuggaauggcccaaggauaggcguaaaugugggcuuuucugggcaaaccuucgagcugcuauuaauguuaauguauuagccaccagagaaauguaugaacugcagacauucacagaguuaaaugaagagucucgagguucuacaaucucucugaugagaacagacugucuauaa

SEQ ID NO: 9489 - RNA, 2436 nt, Artificial Sequence
  derived and/or modified sequence opt1 from TLR10__Homo_sapiens__AAY78487
augcgccugauccggaacaucuacaucuucugcagcaucgugaugaccgccgagggcgacgcccccgagcucccggaggagcgcgagcugaugaccaacugcuccaacaugagccugcggaagguccccgcggaccucacgcccgccaccaccacccuggaccuguccuacaaccuccuguuccagcugcagagcuccgacuuccacagcguguccaagcuccgcgugcugauccugugccacaaccggauccagcagcucgaccugaagacguucgaguucaacaaggagcugcgcuaccucgaccugagcaacaaccggcugaaguccgucaccugguaccuccuggccgggcugcgcuaccucgaccugagcuucaacgacuucgacaccaugcccaucugcgaggaggccggcaacaugucccaccuggagauccucgggcugagcggcgccaagauccagaaguccgacuuccagaagaucagccaccuccaccugaacaccguguuccugggguuccggacgcugccgcacuacgaggagggcucccuccccauccugaacaccaccaagcugcacaucgugcuccccauggacaccaacuucuggguccugcugcgcgacggcaucaagacgagcaagauccucgagaugaccaacaucgacgggaagucccaguucgugagcuacgagaugcagcggaaccugucccuggagcacgcgaagaccagcgugcuccugcugaacaaggucgaccuccugugggacgaccuguuccucauccugcaguucguguggcacaccagcguggagcacuuccagauccgcaacgucacguucggcgggaaggccuaccuggaccacaacuccuucgacuacagcaacaccaucaugcggaccaucaagcucgagcacgugcacuuccgcguguucuacauccagcaggacaagaucuaccugcugcugaccaagauggacaucgagaaccucacgaucuccaacgcccagaugccccacaugcuguucccgaacuaccccaccaaguuccaguaccugaacuucgccaacaacauccucaccgacgagcuguucaagcggacccugcagcucccccaccugaagacgcugauccucaacggcaacaagcuggagacccugagccucgucuccugcuucgcgaacaacacgccccuggagcaccuggaccucagccagaaccugcugcagcacaagaacgacgagaacugcuccuggccggagaccguggugaacaugaaccucagcuacaacaagcuguccgacagcgucuuccgcugccugcccaaguccauccagauccucgaccugaacaacaaccagauccagaccgugcccaaggagaccauccaccugauggcccuccgggagcugaacaucgccuucaacuuccugaccgaccuccccgggugcagccacuucucccgccugagcgugcugaacaucgagaugaacuucauccucuccccgagccuggacuucguccaguccugccaggaggugaagacccugaacgccggccggaaccccuuccgcugcacgugcgagcucaagaacuucauccagcuggagaccuacagcgaggugaugauggucggcugguccgacagcuacacgugcgaguacccccugaaccuccgggggacccgccugaaggacgugcaccuccacgagcugagcugcaacaccgcccugcugaucgucaccaucguggugaucaugcucguccugggccuggcgguggccuucugcugccuccacuucgaccugcccugguaccugcgcaugcucgggcagugcacccagaccuggcaccgggugcgcaagaccacgcaggagcagcugaagcggaacguccgcuuccacgccuucaucuccuacagcgagcacgacucccugugggugaagaacgagcucaucccgaaccuggagaaggaggacggcagcauccugaucugccucuacgaguccuacuucgaccccggcaagagcaucuccgagaacaucgugagcuucaucgagaaguccuacaagagcaucuucguccugucccccaacuucgugcagaacgaguggugccacuacgaguucuacuucgcccaccacaaccuguuccacgagaacagcgaccacaucauccucauccugcuggagcccaucccguucuacugcauccccacccgguaccacaagcucaaggcccugcuggagaagaaggcguaccucgaguggcccaaggaccgccggaagugcgggcuguucugggccaaccugcgcgccgccaucaacgugaacguccucgccacccgggagauguacgagcugcagaccuucacggagcugaacgaggagucccgcggcagcaccaucucccucaugcggaccgacugccuguga

SEQ ID NO: 9490 - RNA, 2436 nt, Artificial Sequence
  derived and/or modified sequence opt2 from TLR10__Homo_sapiens__AAY78487
augcgccucauccgcaacaucuacaucuucugcuccaucgucaugaccgccgagggcgacgcccccgagcuccccgaggagcgcgagcucaugaccaacugcuccaacaugucccuccgcaagguccccgccgaccucacccccgccaccaccacccucgaccucuccuacaaccuccucuuccagcuccaguccuccgacuuccacuccgucuccaagcuccgcguccucauccucugccacaaccgcauccagcagcucgaccucaagaccuucgaguucaacaaggagcuccgcuaccucgaccucuccaacaaccgccucaaguccgucaccugguaccuccucgccggccuccgcuaccucgaccucuccuucaacgacuucgacaccaugcccaucugcgaggaggccggcaacaugucccaccucgagauccucggccucuccggcgccaagauccagaaguccgacuuccagaagaucucccaccuccaccucaacaccgucuuccucggcuuccgcacccucccccacuacgaggagggcucccuccccauccucaacaccaccaagcuccacaucguccuccccauggacaccaacuucuggguccuccuccgcgacggcaucaagaccuccaagauccucgagaugaccaacaucgacggcaagucccaguucgucuccuacgagaugcagcgcaaccucucccucgagcacgccaagaccuccguccuccuccucaacaaggucgaccuccucugggacgaccucuuccucauccuccaguucgucuggcacaccuccgucgagcacuuccagauccgcaacgucaccuucggcggcaaggccuaccucgaccacaacuccuucgacuacuccaacaccaucaugcgcaccaucaagcucgagcacguccacuuccgcgucuucuacauccagcaggacaagaucuaccuccuccucaccaagauggacaucgagaaccucaccaucuccaacgcccagaugccccacaugcucuuccccaacuaccccaccaaguuccaguaccucaacuucgccaacaacauccucaccgacgagcucuucaagcgcacccuccagcucccccaccucaagacccucauccucaacggcaacaagcucgagacccucucccucgucuccugcuucgccaacaacaccccccucgagcaccucgaccucucccagaaccuccuccagcacaagaacgacgagaacugcuccuggcccgagaccgucgucaacaugaaccucuccuacaacaagcucuccgacuccgucuuccgcugccuccccaaguccauccagauccucgaccucaacaacaaccagauccagaccguccccaaggagaccauccaccucauggcccuccgcgagcucaacaucgccuucaacuuccucaccgaccuccccggcugcucccacuucucccgccucuccguccucaacaucgagaugaacuucauccucucccccucccucgacuucguccaguccugccaggaggucaagacccucaacgccggccgcaaccccuuccgcugcaccugcgagcucaagaacuucauccagcucgagaccuacuccgaggucaugauggucggcugguccgacuccuacaccugcgaguacccccucaaccuccgcggcacccgccucaaggacguccaccuccacgagcucuccugcaacaccgcccuccucaucgucaccaucgucgucaucaugcucguccucggccucgccgucgccuucugcugccuccacuucgaccuccccugguaccuccgcaugcucggccagugcacccagaccuggcaccgcguccgcaagaccacccaggagcagcucaagcgcaacguccgcuuccacgccuucaucuccuacuccgagcacgacucccucugggucaagaacgagcucauccccaaccucgagaaggaggacggcuccauccucaucugccucuacgaguccuacuucgaccccggcaaguccaucuccgagaacaucgucuccuucaucgagaaguccuacaaguccaucuucguccucucccccaacuucguccagaacgaguggugccacuacgaguucuacuucgcccaccacaaccucuuccacgagaacuccgaccacaucauccucauccuccucgagcccauccccuucuacugcauccccacccgcuaccacaagcucaaggcccuccucgagaagaaggccuaccucgaguggcccaaggaccgccgcaagugcggccucuucugggccaaccuccgcgccgccaucaacgucaacguccucgccacccgcgagauguacgagcuccagaccuucaccgagcucaacgaggagucccgcggcuccaccaucucccucaugcgcaccgacugccucuga

SEQ ID NO: 9491 - RNA, 2436 nt, Artificial Sequence
  derived and/or modified sequence opt3 from TLR10__Homo_sapiens__AAY78487
augagacugaucaggaacauuuacauauucugcagcaucgugaugaccgccgagggcgacgcucccgaacucccugaggaacgggagcuuaugacaaauuguuccaacaugucucugcgcaaggucccagcagauuugacuccggccacgaccacauuagaccugucauauaaucuacucuuucagcugcaaaguagcgauuuccacuccguuucuaaacuucgagugcugauuuugugccauaaccguauccagcagcucgaccugaagacuuuugaauuuaauaaagagcugagauaccucgauuuaucgaacaauaggcugaagucaguaaccugguaucuuuuggcggggcugcgguaccuagaccucagcuucaacgauuucgacacaaugcccauuugugaggaagcuggaaauaugagucaccuggagauccuuggucuguccggcgccaaaauacagaagucugauuuucaaaagaucagccauuugcaccucaacaccguguuccugggguuucgcacuuuaccucauuaugaagagggaucccugccaauucucaauacaaccaaacuucacaucguccugcccauggacacgaacuucuggguguugcuaagagauggcauuaagacuucaaaaauccuggagaugaccaauauagacgguaagagucaguuuguuagcuacgaaaugcagaggaaccucucucuggagcacgcaaaaacauccgugcuucuguugaauaaggucgaucuccugugggacgacuuauuccugauucuacaguuuguguggcauacuucaguagaacacuuccaaauccggaacguuaccuucgggggaaaggccuaucucgaucauaacagcuuugacuacaguaauacaauuaugcgcaccaucaaacuggagcacgugcacuuccgagucuuuuacauccagcaggauaagauuuaucuuuugcugacgaaaauggacauagaaaaccucacuaucucuaaugcucagaugccucauaugcuguucccaaacuaccccacaaaguuucaauaucuuaauuucgcaaacaauauucugaccgaugaguuguuuaaaagaacucuccagcugccucacuuaaagacacugauccuaaacggcaauaaacucgagacccugucccuugugagcugcuucgccaacaauacgccauuggaacaucuggaccucucgcagaaccuguuacaacacaagaaugaugagaacuguucuuggccggaaaccguggucaauaugaaccuguccuacaacaaacuuucagacaguguuuuuaggugcuugcccaagagcauacagauucucgaucugaauaacaaucagauccagacagugccuaaggagacuauccaucuaauggcucugcgggaacucaacauugccuucaauuuucugaccgaccuuccaggcuguucccacuucucucguuugagcguacugaacaucgagaugaauuuuauuuuaucacccagucucgauuucgugcaauccugccaggaggucaaaacacugaacgcggggcgcaauccuuucagauguacuugcgaacuuaagaacuuuauacagcuggagaccuauagcgaagugaugaugguuggauggucugacucauacacaugugaguauccauugaaucucagggguacccggcugaaagacgugcaccuacaugaacugaguugcaacacugcacuccugaucgucacgauugugguaaucaugcuuguuuugggccuggccguggcuuucugcuguuuacacuuugaucuccccugguaccugcgaaugcuugggcagugcacacaaaccuggcaucgcgucagaaagacuacccaggagcagcugaagaggaaugugcgguuccacgccuuuaucagcuacuccgagcacgacucucuaugggucaaaaacgaacucauuccgaaucuggagaaggaagauggaucgauauugaucugucuguaugagagcuacuucgacccuggcaaauccauuucagagaacaucgugaguuuuauugaaaagucuuauaaaagcaucuucguuuuaucccccaacuuugugcagaaugaguggugccauuacgaguucuauuuugcacaccauaaccucuuccacgaaaauucagaucauauaauccugauucuucuggaaccaaucccuuuuuacuguauucccacacgcuaucacaaguugaaggcucuccuggagaaaaaggccuaccuagaguggccaaaagacagaaggaagugcggucuguucugggcgaaccuucgugccgcaaucaauguaaacguccucgcuacccgggaaauguacgagcugcaaacuuucacagaauugaaugaggaaagccgagggucuacgauaucccugaugagaaccgauuguuuauga

SEQ ID NO: 9492 - RNA, 2436 nt, Artificial Sequence
  derived and/or modified sequence opt4 from TLR10__Homo_sapiens__AAY78487
augagacugaucagaaacaucuacaucuucugcagcaucgugaugaccgccgagggcgacgcccccgagcugcccgaggagagagagcugaugaccaacugcagcaacaugagccugagaaaggugcccgccgaccugacccccgccaccaccacccuggaccugagcuacaaccugcuguuccagcugcagagcagcgacuuccacagcgugagcaagcugagagugcugauccugugccacaacagaauccagcagcuggaccugaagaccuucgaguucaacaaggagcugagauaccuggaccugagcaacaacagacugaagagcgugaccugguaccugcuggccggccugagauaccuggaccugagcuucaacgacuucgacaccaugcccaucugcgaggaggccggcaacaugagccaccuggagauccugggccugagcggcgccaagauccagaagagcgacuuccagaagaucagccaccugcaccugaacaccguguuccugggcuucagaacccugccccacuacgaggagggcagccugcccauccugaacaccaccaagcugcacaucgugcugcccauggacaccaacuucugggugcugcugagagacggcaucaagaccagcaagauccuggagaugaccaacaucgacggcaagagccaguucgugagcuacgagaugcagagaaaccugagccuggagcacgccaagaccagcgugcugcugcugaacaagguggaccugcugugggacgaccuguuccugauccugcaguucguguggcacaccagcguggagcacuuccagaucagaaacgugaccuucggcggcaaggccuaccuggaccacaacagcuucgacuacagcaacaccaucaugagaaccaucaagcuggagcacgugcacuucagaguguucuacauccagcaggacaagaucuaccugcugcugaccaagauggacaucgagaaccugaccaucagcaacgcccagaugccccacaugcuguuccccaacuaccccaccaaguuccaguaccugaacuucgccaacaacauccugaccgacgagcuguucaagagaacccugcagcugccccaccugaagacccugauccugaacggcaacaagcuggagacccugagccuggugagcugcuucgccaacaacaccccccuggagcaccuggaccugagccagaaccugcugcagcacaagaacgacgagaacugcagcuggcccgagaccguggugaacaugaaccugagcuacaacaagcugagcgacagcguguucagaugccugcccaagagcauccagauccuggaccugaacaacaaccagauccagaccgugcccaaggagaccauccaccugauggcccugagagagcugaacaucgccuucaacuuccugaccgaccugcccggcugcagccacuucagcagacugagcgugcugaacaucgagaugaacuucauccugagccccagccuggacuucgugcagagcugccaggaggugaagacccugaacgccggcagaaaccccuucagaugcaccugcgagcugaagaacuucauccagcuggagaccuacagcgaggugaugauggugggcuggagcgacagcuacaccugcgaguacccccugaaccugagaggcaccagacugaaggacgugcaccugcacgagcugagcugcaacaccgcccugcugaucgugaccaucguggugaucaugcuggugcugggccuggccguggccuucugcugccugcacuucgaccugcccugguaccugagaaugcugggccagugcacccagaccuggcacagagugagaaagaccacccaggagcagcugaagagaaacgugagauuccacgccuucaucagcuacagcgagcacgacagccugugggugaagaacgagcugauccccaaccuggagaaggaggacggcagcauccugaucugccuguacgagagcuacuucgaccccggcaagagcaucagcgagaacaucgugagcuucaucgagaagagcuacaagagcaucuucgugcugagccccaacuucgugcagaacgaguggugccacuacgaguucuacuucgcccaccacaaccuguuccacgagaacagcgaccacaucauccugauccugcuggagcccauccccuucuacugcauccccaccagauaccacaagcugaaggcccugcuggagaagaaggccuaccuggaguggcccaaggacagaagaaagugcggccuguucugggccaaccugagagccgccaucaacgugaacgugcuggccaccagagagauguacgagcugcagaccuucaccgagcugaacgaggagagcagaggcagcaccaucagccugaugagaaccgacugccuguga

SEQ ID NO: 9493 - RNA, 2436 nt, Artificial Sequence
  derived and/or modified sequence opt5 from TLR10__Homo_sapiens__AAY78487
augagacugauccggaacauuuacaucuucugcagcauugugaugaccgccgagggcgacgcucccgaacucccugaggaacgcgagcugaugacaaauuguuccaacaugucucuuagaaaggucccggccgaucugacgcccgcgaccacaacccucgaccugagcuauaaucuucuguuucagcuccaauccucugauuuccacagcguuuccaaacugcgggugcugauccucugccauaaccgcauucagcagcuggaccuuaagacauuugaguucaauaaagagcugagauaccucgaucugucuaacaaucggcuuaagagcgugaccugguaucugcucgcugggcugcgcuaccuggaccucuccuuuaacgauuucgacacaaugccuaucugugaggaagccggaaauaugagccaccuggagauccuuggccugucuggggccaaaauucagaaguccgauuuucaaaagaucagccaucuccaccugaacaccgucuuccuuggauuuagaacgcugccccauuaugaagagggcucucucccuauucugaauaccacaaaacugcacaucgugcuccccauggacaccaacuucuggguucugcuucgggaugggauuaagacauccaaaauccuggagaugaccaauauugacggaaagagccaguuugugucuuacgaaaugcagcgcaaccucucccuggagcacgcuaaaacgagcguccuucugcucaauaagguggaucugcugugggacgaccucuuccugauccuucaguuuguuuggcauacauccguggaacacuuccaaaucagaaacgucaccuucggcggcaaggccuaucuggaucauaacucuuuugacuacagcaauacaauuaugcggaccaucaaacucgagcacgugcacuuccgcguguuuuacauucagcaggauaagaucuaucugcugcuuaccaaaauggacauugaaaaccucacaaucuccaaugcucagaugccucauaugcuguucccgaacuaccccacgaaguuucaauaucugaauuucgccaacaauauccucaccgaugagcuguuuaaaagaacacuucagcugccucaccucaagacccugauucugaacgggaauaaacuugagacacucagccuggucucuugcuucgcgaacaauacgccccuggaacaucucgaccugucccagaaccuucugcaacacaagaaugaugagaacuguagcuggccugaaaccguugugaauaugaaccucucuuacaacaagcugagcgacuccguguuucggugccugcccaaaucuauccagauucuugaucucaauaacaaucagauccagacagucccgaaggagaccauucaucugauggcccugcgcgaacucaacaucgcuuucaauuuucugaccgaccuuccuggauguagccacuucuccagacugagcgugcucaacaucgagaugaauuuuauucugucucccucccuggauuucguucaaagcugccaggaggugaaaacacuuaacgccggccggaauccuuucagauguaccugcgaacucaagaacuuuauccagcuggagacauauucugaagucaugaugguggggugguccgacagcuacacgugugaguauccccugaaucuccgcggaacccggcugaaagacguucaccuucaugaacuguccugcaacacagcucuccugauugugaccaucgucgugauuaugcugguccuuggccuggccguggcguucugcugucuccacuuugaucugcccugguaccucagaaugcuggggcagugcacacaaaccuggcaucgcguucggaagacgacccaggagcagcuuaagagaaaugugcgcuuccacgccuuuaucucuuacagcgagcacgacucccugugggucaaaaacgaacucauuccuaaucuggagaaggaagauggaucuauccugaucugucuuuaugagagcuacuucgacccgggcaaauccauuagcgagaacaucgugucuuuuauugaaaaguccuauaaaagcaucuucguucugucucccaacuuugugcagaaugaguggugccauuacgaguucuauuuugcucaccauaaccucuuccacgaaaauuccgaucauauuauccugauccuccuggaaccuauucccuuuuacuguaucccuacacgguaucacaaacuuaaggcccugcucgaaaagaaggcuuaccuggaguggcccaaagacagacgcaagugcggccuguucugggccaaccuucgggccgcuauuaaugucaacgugcuggcgaccagagaaauguacgagcuccaaacauucaccgaacugaaugaggaaagccgcgggucuacgaucagccucaugcggacagauugucuguga

SEQ ID NO: 9494 - protein, 811 aa, Artificial Sequence [sequence omitted]

SEQ ID NO: 9495 - RNA, 2436 nt, Artificial Sequence
  TLR10__Homo_sapiens__AAY78488
augagacucaucagaaacauuuacauauuuuguaguauaguuaugacagcagagggugaugcuccagagcugccagaagaaagggaacugaugaccaacugcuccaacaugucucuaagaaagguucccgcagacuugaccccagccacaacaacacuggauuuauccuauaaccuccuuuuucaacuccagaguucagauuuucauucugucuccaaacugagaguuuugauucuaugccauaacagaauucaacagcuggaucucaaaaccuuugaauucaacaaggaguuaagauauuuagauuugucuaauaacagacugaagaguguaacuugguauuuacuggcaggucucagguauuuagaucuuucuuuuaaugacuuugacaccaugccuaucugugaggaagcuggcaacaugucacaccuggaaauccuagguuugaguggggcaaaaauacaaaaaucagauuuccagaaaauuucucaucugcaucuaaauacugucuucuuaggauucagaacucuuccucauuaugaagaagguagccugcccaucuuaaacacaacaaaacugcacauuguuuuaccaauggacacaaauuucuggguucuuuugcgugauggaaucaagacuucaaaaauauuagaaaugacaaauauagauggcaaaagccaauuuguaaguuaugaaaugcaacgaaaucuuaguuuagaacaugcuaagacaucgguucuauugcuuaauaaaguugauuuacucugggacgaccuuuuccuuaucuuacaauuuguuuggcauacaucaguggaacacuuucagauccgaaaugugacuuuuggugguaaggcuuaucuugaccacaauucauuugacuacucaaauacuauaaugagaacuauaaaauuggagcauguacauuucagaguguuuuacauucaacaggauaaaaucuauuugcuuuugaccaaaacggacauagaaaaccugacaauaucaaaugcacaaaugccacacaugcuuuucccuaauuauccuacgaaauuccaauauuuaaauuuugccaauaauaucuuaacagacgaguuguuuaaaagaacucuccaacugccucacuugaaaacucucauuuugaauggcaauaaacuggagacacuuucuuuaguaaguugcuuugcuaacaacacacccuuggaacacuuggaucugagucaaaaucuauuacaacauaaaaaugaugaaaauugcucauggccagaaacuguggucaauaugaaucugucauacaauaaauugucugauucugucuucaggugcuugcccaaaaguauucaaauacuugaccuaaauaauaaccaaauccaaacuguaccuaaagagacuauucaucugauggccuuacgagaacuaaauauugcauuuaauuuucuaacugaucucccuggaugcagucauuucaguagacuuucaguucugaacauugaaaugaacuucauucucagcccaucucuggauuuuguucagagcugccaggaaguuaaaacucuaaaugcgggaagaaauccauuccgguguaccugugaauuaaaaaauuucauucagcuugaaacauauucagaggucaugaugguuggauggucagauucauacaccugugaauacccuuuaaaccuaaggggaacuagguuaaaagacguucaucuccacgaauuaucuugcaacacagcucuguugauugucaccauugugguuauuaugcuaguucugggguuggcuguggccuucugcugucuccacuuugaucugcccugguaucucaggaugcuaggucaaugcacacaaacauggcacaggguuaggaaaacaacccaagaacaacucaagagaaauguccgauuccacgcauuuauuucauacagugaacaugauucucugugggugaagaaugaauugauccccaaucuagagaaggaagaugguucuaucuugauuugccuuuaugaaagcuacuuugacccuggcaaaagcauuagugaaaauauuguaagcuucauugagaaaagcuauaaguccaucuuuguuuugucucccaacuuuguccagaaugaguggugccauuaugaauucuacuuugcccaccacaaucucuuccaugaaaauucugaucacauaauucuuaucuuacuggaacccauuccauucuauugcauucccaccagguaucauaaacugaaagcucuccuggaaaaaaaagcauacuuggaauggcccaaggauaggcguaaaugugggcuuuucugggcaaaccuucgagcugcuauuaauguuaauguauuagccaccagagaaauguaugaacugcagacauucacagaguuaaaugaagagucucgagguucuacaaucucucugaugagaacagacugucuauaa

SEQ ID NO: 9496 - RNA, 2436 nt, Artificial Sequence
  derived and/or modified sequence opt1 from TLR10__Homo_sapiens__AAY78488
augcgccugauccggaacaucuacaucuucugcagcaucgugaugaccgccgagggcgacgcccccgagcucccggaggagcgcgagcugaugaccaacugcuccaacaugagccugcggaagguccccgcggaccucacgcccgccaccaccacccuggaccuguccuacaaccuccuguuccagcugcagagcuccgacuuccacagcguguccaagcuccgcgugcugauccugugccacaaccggauccagcagcucgaccugaagacguucgaguucaacaaggagcugcgcuaccucgaccugagcaacaaccggcugaaguccgucaccugguaccuccuggccgggcugcgcuaccucgaccugagcuucaacgacuucgacaccaugcccaucugcgaggaggccggcaacaugucccaccuggagauccucgggcugagcggcgccaagauccagaaguccgacuuccagaagaucagccaccuccaccugaacaccguguuccugggguuccggacgcugccgcacuacgaggagggcucccuccccauccugaacaccaccaagcugcacaucgugcuccccauggacaccaacuucuggguccugcugcgcgacggcaucaagacgagcaagauccucgagaugaccaacaucgacgggaagucccaguucgugagcuacgagaugcagcggaaccugucccuggagcacgcgaagaccagcgugcuccugcugaacaaggucgaccuccugugggacgaccuguuccucauccugcaguucguguggcacaccagcguggagcacuuccagauccgcaacgucacguucggcgggaaggccuaccuggaccacaacuccuucgacuacagcaacaccaucaugcggaccaucaagcucgagcacgugcacuuccgcguguucuacauccagcaggacaagaucuaccugcugcugaccaagacggacaucgagaaccucaccaucuccaacgcccagaugccccacaugcuguucccgaacuaccccaccaaguuccaguaccugaacuucgccaacaacauccucaccgacgagcuguucaagcggacgcugcagcucccccaccugaagacccugauccucaacggcaacaagcuggagacccugagccucgucuccugcuucgcgaacaacacgccccuggagcaccuggaccucagccagaaccugcugcagcacaagaacgacgagaacugcuccuggccggagaccguggugaacaugaaccucagcuacaacaagcuguccgacagcgucuuccgcugccugcccaaguccauccagauccucgaccugaacaacaaccagauccagaccgugcccaaggagaccauccaccugauggcccuccgggagcugaacaucgccuucaacuuccugaccgaccuccccgggugcagccacuucucccgccugagcgugcugaacaucgagaugaacuucauccucuccccgagccuggacuucguccaguccugccaggaggugaagacgcugaacgccggccggaaccccuuccgcugcacgugcgagcucaagaacuucauccagcuggagaccuacagcgaggugaugauggucggcugguccgacagcuacacgugcgaguacccccugaaccuccgggggacccgccugaaggacgugcaccuccacgagcugagcugcaacaccgcccugcugaucgucaccaucguggugaucaugcucguccugggccuggcgguggccuucugcugccuccacuucgaccugcccugguaccugcgcaugcucgggcagugcacccagaccuggcaccgggugcgcaagaccacccaggagcagcugaagcggaacguccgcuuccacgccuucaucuccuacagcgagcacgacucccugugggugaagaacgagcucaucccgaaccuggagaaggaggacggcagcauccugaucugccucuacgaguccuacuucgaccccggcaagagcaucuccgagaacaucgugagcuucaucgagaaguccuacaagagcaucuucguccugucccccaacuucgugcagaacgaguggugccacuacgaguucuacuucgcccaccacaaccuguuccacgagaacagcgaccacaucauccucauccugcuggagcccaucccguucuacugcauccccacccgguaccacaagcucaaggcccugcuggagaagaaggcguaccucgaguggcccaaggaccgccggaagugcgggcuguucugggccaaccugcgcgccgccaucaacgugaacguccucgccacccgggagauguacgagcugcagacguucaccgagcugaacgaggagucccgcggcagcaccaucucccucaugcggaccgacugccuguga

SEQ ID NO: 9497 - RNA, 2436 nt, Artificial Sequence
  derived and/or modified sequence opt2 from TLR10__Homo_sapiens__AAY78488
augcgccucauccgcaacaucuacaucuucugcuccaucgucaugaccgccgagggcgacgcccccgagcuccccgaggagcgcgagcucaugaccaacugcuccaacaugucccuccgcaagguccccgccgaccucacccccgccaccaccacccucgaccucuccuacaaccuccucuuccagcuccaguccuccgacuuccacuccgucuccaagcuccgcguccucauccucugccacaaccgcauccagcagcucgaccucaagaccuucgaguucaacaaggagcuccgcuaccucgaccucuccaacaaccgccucaaguccgucaccugguaccuccucgccggccuccgcuaccucgaccucuccuucaacgacuucgacaccaugcccaucugcgaggaggccggcaacaugucccaccucgagauccucggccucuccggcgccaagauccagaaguccgacuuccagaagaucucccaccuccaccucaacaccgucuuccucggcuuccgcacccucccccacuacgaggagggcucccuccccauccucaacaccaccaagcuccacaucguccuccccauggacaccaacuucuggguccuccuccgcgacggcaucaagaccuccaagauccucgagaugaccaacaucgacggcaagucccaguucgucuccuacgagaugcagcgcaaccucucccucgagcacgccaagaccuccguccuccuccucaacaaggucgaccuccucugggacgaccucuuccucauccuccaguucgucuggcacaccuccgucgagcacuuccagauccgcaacgucaccuucggcggcaaggccuaccucgaccacaacuccuucgacuacuccaacaccaucaugcgcaccaucaagcucgagcacguccacuuccgcgucuucuacauccagcaggacaagaucuaccuccuccucaccaagaccgacaucgagaaccucaccaucuccaacgcccagaugccccacaugcucuuccccaacuaccccaccaaguuccaguaccucaacuucgccaacaacauccucaccgacgagcucuucaagcgcacccuccagcucccccaccucaagacccucauccucaacggcaacaagcucgagacccucucccucgucuccugcuucgccaacaacaccccccucgagcaccucgaccucucccagaaccuccuccagcacaagaacgacgagaacugcuccuggcccgagaccgucgucaacaugaaccucuccuacaacaagcucuccgacuccgucuuccgcugccuccccaaguccauccagauccucgaccucaacaacaaccagauccagaccguccccaaggagaccauccaccucauggcccuccgcgagcucaacaucgccuucaacuuccucaccgaccuccccggcugcucccacuucucccgccucuccguccucaacaucgagaugaacuucauccucucccccucccucgacuucguccaguccugccaggaggucaagacccucaacgccggccgcaaccccuuccgcugcaccugcgagcucaagaacuucauccagcucgagaccuacuccgaggucaugauggucggcugguccgacuccuacaccugcgaguacccccucaaccuccgcggcacccgccucaaggacguccaccuccacgagcucuccugcaacaccgcccuccucaucgucaccaucgucgucaucaugcucguccucggccucgccgucgccuucugcugccuccacuucgaccuccccugguaccuccgcaugcucggccagugcacccagaccuggcaccgcguccgcaagaccacccaggagcagcucaagcgcaacguccgcuuccacgccuucaucuccuacuccgagcacgacucccucugggucaagaacgagcucauccccaaccucgagaaggaggacggcuccauccucaucugccucuacgaguccuacuucgaccccggcaaguccaucuccgagaacaucgucuccuucaucgagaaguccuacaaguccaucuucguccucucccccaacuucguccagaacgaguggugccacuacgaguucuacuucgcccaccacaaccucuuccacgagaacuccgaccacaucauccucauccuccucgagcccauccccuucuacugcauccccacccgcuaccacaagcucaaggcccuccucgagaagaaggccuaccucgaguggcccaaggaccgccgcaagugcggccucuucugggccaaccuccgcgccgccaucaacgucaacguccucgccacccgcgagauguacgagcuccagaccuucaccgagcucaacgaggagucccgcggcuccaccaucucccucaugcgcaccgacugccucuga

SEQ ID NO: 9498 - RNA, 2436 nt, Artificial Sequence
  derived and/or modified sequence opt3 from TLR10__Homo_sapiens__AAY78488
augagacugaucaggaacauuuacauauucugcagcaucgugaugaccgccgagggcgacgcucccgaacucccugaggaacgggagcuuaugacaaauuguuccaacaugucucugcgcaaggucccagcagauuugacuccggccacgaccacauuagaccugucauauaaucuacucuuucagcugcaaaguagcgauuuccacuccguuucuaaacuucgagugcugauuuugugccauaaccguauccagcagcucgaccugaagacuuuugaauuuaauaaagagcugagauaccucgauuuaucgaacaauaggcugaagucaguaaccugguaucuuuuggcggggcugcgguaccuagaccucagcuucaacgauuucgacacaaugcccauuugugaggaagcuggaaauaugagucaccuggagauccuuggucuguccggcgccaaaauacagaagucugauuuucaaaagaucagccauuugcaccucaacaccguguuccugggguuucgcacuuuaccucauuaugaagagggaucccugccaauucucaauacaaccaaacuucacaucguccugcccauggacacgaacuucuggguguugcuaagagauggcauuaagacuucaaaaauccuggagaugaccaauauagacgguaagagucaguuuguuagcuacgaaaugcagaggaaccucucucuggagcacgcaaaaacauccgugcuucuguugaauaaggucgaucuccugugggacgacuuauuccugauucuacaguuuguguggcauacuucaguagaacacuuccaaauccggaacguuaccuucgggggaaaggccuaucucgaucauaacagcuuugacuacaguaauacaauuaugcgcaccaucaaacuggagcacgugcacuuccgagucuuuuacauccagcaggauaagauuuaucuuuugcugacgaaaacugacauagaaaaccucacaaucucuaaugcucagaugccucauaugcuguucccaaacuaccccaccaaguuucaauaucuuaauuucgcaaacaauauucugacugaugaguuguuuaaaagaacacuccagcugccucacuuaaagacccugauccuaaacggcaauaaacucgagacgcugucccuugugagcugcuucgccaacaauaccccauuggaacaucuggaccucucgcagaaccuguuacaacacaagaaugaugagaacuguucuuggccggaaacaguggucaauaugaaccuguccuacaacaaacuuucagacaguguuuuuaggugcuugcccaagagcauacagauucucgaucugaauaacaaucagauccagacugugccuaaggagaccauccaucuaauggcucugcgggaacucaacauugccuucaauuuucugacagaccuuccaggcuguucccacuucucucguuugagcguacugaacaucgagaugaauuuuauuuuaucacccagucucgauuucgugcaauccugccaggaggucaaaacucugaacgcggggcgcaauccuuucagauguaccugcgaacuuaagaacuuuauacagcuggagacauauagcgaagugaugaugguuggauggucugacucauacaccugugaguauccauugaaucucagggguacucggcugaaagacgugcaccuacaugaacugaguugcaacacggcacuccugaucgucacaauugugguaaucaugcuuguuuugggccuggccguggcuuucugcuguuuacacuuugaucuccccugguaccugcgaaugcuugggcagugcacccaaacuuggcaucgcgucagaaagaccacacaggagcagcugaagaggaaugugcgguuccacgccuuuaucagcuacuccgagcacgacucucuaugggucaaaaacgaacucauuccgaaucuggagaaggaagauggaucgauauugaucugucuguaugagagcuacuucgacccuggcaaauccauuucagagaacaucgugaguuuuauugaaaagucuuauaaaagcaucuucguuuuaucccccaacuuugugcagaaugaguggugccauuacgaguucuauuuugcacaccauaaccucuuccacgaaaauucagaucauauaauccugauucuucuggaaccaaucccuuuuuacuguauucccacccgcuaucacaaguugaaggcucuccuggagaaaaaggccuaccuagaguggccaaaagacagaaggaagugcggucuguucugggcgaaccuucgugccgcaaucaauguaaacguccucgcuacucgggaaauguacgagcugcaaacauucacggaauugaaugaggaaagccgagggucuaccauaucccugaugagaacugauuguuuauga

SEQ ID NO: 9499 - RNA, 2436 nt, Artificial Sequence
  derived and/or modified sequence opt4 from TLR10__Homo_sapiens__AAY78488
augagacugaucagaaacaucuacaucuucugcagcaucgugaugaccgccgagggcgacgcccccgagcugcccgaggagagagagcugaugaccaacugcagcaacaugagccugagaaaggugcccgccgaccugacccccgccaccaccacccuggaccugagcuacaaccugcuguuccagcugcagagcagcgacuuccacagcgugagcaagcugagagugcugauccugugccacaacagaauccagcagcuggaccugaagaccuucgaguucaacaaggagcugagauaccuggaccugagcaacaacagacugaagagcgugaccugguaccugcuggccggccugagauaccuggaccugagcuucaacgacuucgacaccaugcccaucugcgaggaggccggcaacaugagccaccuggagauccugggccugagcggcgccaagauccagaagagcgacuuccagaagaucagccaccugcaccugaacaccguguuccugggcuucagaacccugccccacuacgaggagggcagccugcccauccugaacaccaccaagcugcacaucgugcugcccauggacaccaacuucugggugcugcugagagacggcaucaagaccagcaagauccuggagaugaccaacaucgacggcaagagccaguucgugagcuacgagaugcagagaaaccugagccuggagcacgccaagaccagcgugcugcugcugaacaagguggaccugcugugggacgaccuguuccugauccugcaguucguguggcacaccagcguggagcacuuccagaucagaaacgugaccuucggcggcaaggccuaccuggaccacaacagcuucgacuacagcaacaccaucaugagaaccaucaagcuggagcacgugcacuucagaguguucuacauccagcaggacaagaucuaccugcugcugaccaagaccgacaucgagaaccugaccaucagcaacgcccagaugccccacaugcuguuccccaacuaccccaccaaguuccaguaccugaacuucgccaacaacauccugaccgacgagcuguucaagagaacccugcagcugccccaccugaagacccugauccugaacggcaacaagcuggagacccugagccuggugagcugcuucgccaacaacaccccccuggagcaccuggaccugagccagaaccugcugcagcacaagaacgacgagaacugcagcuggcccgagaccguggugaacaugaaccugagcuacaacaagcugagcgacagcguguucagaugccugcccaagagcauccagauccuggaccugaacaacaaccagauccagaccgugcccaaggagaccauccaccugauggcccugagagagcugaacaucgccuucaacuuccugaccgaccugcccggcugcagccacuucagcagacugagcgugcugaacaucgagaugaacuucauccugagccccagccuggacuucgugcagagcugccaggaggugaagacccugaacgccggcagaaaccccuucagaugcaccugcgagcugaagaacuucauccagcuggagaccuacagcgaggugaugauggugggcuggagcgacagcuacaccugcgaguacccccugaaccugagaggcaccagacugaaggacgugcaccugcacgagcugagcugcaacaccgcccugcugaucgugaccaucguggugaucaugcuggugcugggccuggccguggccuucugcugccugcacuucgaccugcccugguaccugagaaugcugggccagugcacccagaccuggcacagagugagaaagaccacccaggagcagcugaagagaaacgugagauuccacgccuucaucagcuacagcgagcacgacagccugugggugaagaacgagcugauccccaaccuggagaaggaggacggcagcauccugaucugccuguacgagagcuacuucgaccccggcaagagcaucagcgagaacaucgugagcuucaucgagaagagcuacaagagcaucuucgugcugagccccaacuucgugcagaacgaguggugccacuacgaguucuacuucgcccaccacaaccuguuccacgagaacagcgaccacaucauccugauccugcuggagcccauccccuucuacugcauccccaccagauaccacaagcugaaggcccugcuggagaagaaggccuaccuggaguggcccaaggacagaagaaagugcggccuguucugggccaaccugagagccgccaucaacgugaacgugcuggccaccagagagauguacgagcugcagaccuucaccgagcugaacgaggagagcagaggcagcaccaucagccugaugagaaccgacugccuguga

SEQ ID NO: 9500 - RNA, 2436 nt, Artificial Sequence
  derived and/or modified sequence opt5 from TLR10__Homo_sapiens__AAY78488
augagacugauccggaacauuuacaucuucugcagcauugugaugaccgccgagggcgacgcucccgaacucccugaggaacgcgagcugaugacaaauuguuccaacaugucucuuagaaaggucccggccgaucugacgcccgcgaccacaacccucgaccugagcuauaaucuucuguuucagcuccaauccucugauuuccacagcguuuccaaacugcgggugcugauccucugccauaaccgcauucagcagcuggaccuuaagacauuugaguucaauaaagagcugagauaccucgaucugucuaacaaucggcuuaagagcgugaccugguaucugcucgcugggcugcgcuaccuggaccucuccuuuaacgauuucgacacaaugccuaucugugaggaagccggaaauaugagccaccuggagauccuuggccugucuggggccaaaauucagaaguccgauuuucaaaagaucagccaucuccaccugaacaccgucuuccuuggauuuagaacgcugccccauuaugaagagggcucucucccuauucugaauaccacaaaacugcacaucgugcuccccauggacaccaacuucuggguucugcuucgggaugggauuaagacauccaaaauccuggagaugaccaauauugacggaaagagccaguuugugucuuacgaaaugcagcgcaaccucucccuggagcacgcuaaaacgagcguccuucugcucaauaagguggaucugcugugggacgaccucuuccugauccuucaguuuguuuggcauacauccguggaacacuuccaaaucagaaacgucaccuucggcggcaaggccuaucuggaucauaacucuuuugacuacagcaauacaauuaugcggaccaucaaacucgagcacgugcacuuccgcguguuuuacauucagcaggauaagaucuaucugcugcuuaccaaaacagacauugaaaaccucacgaucuccaaugcucagaugccucauaugcuguucccgaacuaccccaccaaguuucaauaucugaauuucgccaacaauauccucacagaugagcuguuuaaaagaacccuucagcugccucaccucaagacacugauucugaacgggaauaaacuugagacccucagccuggucucuugcuucgcgaacaauacgccccuggaacaucucgaccugucccagaaccuucugcaacacaagaaugaugagaacuguagcuggccugaaacaguugugaauaugaaccucucuuacaacaagcugagcgacuccguguuucggugccugcccaaaucuauccagauucuugaucucaauaacaaucagauccagaccgucccgaaggagaccauucaucugauggcccugcgcgaacucaacaucgcuuucaauuuucugacagaccuuccuggauguagccacuucuccagacugagcgugcucaacaucgagaugaauuuuauucugucucccucccuggauuucguucaaagcugccaggaggugaaaacccuuaacgccggccggaauccuuucagauguacaugcgaacucaagaacuuuauccagcuggagacguauucugaagucaugaugguggggugguccgacagcuacaccugugaguauccccugaaucuccgcggaacacggcugaaagacguucaccuucaugaacuguccugcaacaccgcucuccugauugugacaaucgucgugauuaugcugguccuuggccuggccguggcguucugcugucuccacuuugaucugcccugguaccucagaaugcuggggcagugcacccaaacguggcaucgcguucggaagaccacacaggagcagcuuaagagaaaugugcgcuuccacgccuuuaucucuuacagcgagcacgacucccugugggucaaaaacgaacucauuccuaaucuggagaaggaagauggaucuauccugaucugucuuuaugagagcuacuucgacccgggcaaauccauuagcgagaacaucgugucuuuuauugaaaaguccuauaaaagcaucuucguucugucucccaacuuugugcagaaugaguggugccauuacgaguucuauuuugcucaccauaaccucuuccacgaaaauuccgaucauauuauccugauccuccuggaaccuauucccuuuuacuguaucccuacccgguaucacaaacuuaaggcccugcucgaaaagaaggcuuaccuggaguggcccaaagacagacgcaagugcggccuguucugggccaaccuucgggccgcuauuaaugucaacgugcuggcgacaagagaaauguacgagcuccaaaccuucacggaacugaaugaggaaagccgcgggucuacaaucagccucaugcggaccgauugucuguga

SEQ ID NO: 9501 - protein, 811 aa, Artificial Sequence; identical to SEQ ID NO: 9438
  TLR10__Homo_sapiens__Q9BXR5

SEQ ID NO: 9502 - RNA, 2436 nt, Artificial Sequence; identical to SEQ ID NO: 9439
  TLR10__Homo_sapiens__AAH89406

SEQ ID NO: 9503 - RNA, 2436 nt, Artificial Sequence; identical to SEQ ID NO: 9440
  derived and/or modified sequence opt1 from TLR10__Homo_sapiens__AAH89406

SEQ ID NO: 9504 - RNA, 2436 nt, Artificial Sequence; identical to SEQ ID NO: 9441
  derived and/or modified sequence opt2 from TLR10__Homo_sapiens__AAH89406

SEQ ID NO: 9505 - RNA, 2436 nt, Artificial Sequence; identical to SEQ ID NO: 9442
  derived and/or modified sequence opt3 from TLR10__Homo_sapiens__AAH89406

SEQ ID NO: 9506 - RNA, 2436 nt, Artificial Sequence; identical to SEQ ID NO: 9443
  derived and/or modified sequence opt4 from TLR10__Homo_sapiens__AAH89406

SEQ ID NO: 9507 - RNA, 2436 nt, Artificial Sequence; identical to SEQ ID NO: 9444
  derived and/or modified sequence opt5 from TLR10__Homo_sapiens__AAH89406

SEQ ID NO: 9508 - protein, 786 aa, Artificial Sequence
  TLR1__Homo_sapiens__D1CS34
MTSIFHFAIIFMLILQIRIQLSEESEFLVDRSKNGLIHVPKDLSQKTTILNISQNYISELWTSDILSLSKLRILIISHNRIQYLDISVFKFNQELEYLDLSHNKLVKISCHPTVNLKHLDLSFNAFDALPICKEFGNMSQLKFLGLSTTHLEKSSVLPIAHLNISKVLLVLGETYGEKEDPEGLQDFNTESLHIVFPTNKEFHFILDVSVKTVANLELSNIKCVLEDNKCSYFLSILAKLQTNPKLSSLTLNNIETTWNSFIRILQLVWHTTVWYFSISNVKLQGQLDFRDFDYSGTSLKALSIHQVVSDVFGFPQSYIYEIFSNMNIKNFTVSGTRMVHMLCPSKISPFLHLDFSNNLLTDTVFENCGHLTELETLILQMNQLKELSKIAEMTTQMKSLQQLDISQNSVSYDEKKGDCSWTKSLLSLNMSSNILTDTIFRCLPPRIKVLDLHSNKIKSIPKQVVKLEALQELNVAFNSLTDLPGCGSFSSLSVLIIDHNSVSHPSADFFQSCQKMRSIKAGDNPFQCTCELGEFVKNIDQVSSEVLEGWPDSYKCDYPESYRGTLLKDFHMSELSCNITLLIVTIVATMLVLAVTVTSLCIYLDLPWYLRMVCQWTQTRRRARNIPLEELQRNLQFHAFISYSGHDSFWVKNELLPNLEKEGMQICLHERNFVPGKSIVENIITCIEKSYKSIFVLSPNFVQSEWCHYELYFAHHNLFHEGSNSLILILLEPIPQYSIPSSYHKLKSLMARRTYLEWPKEKSKRGLFWANLRAAINIKLTEQAKK

SEQ ID NO: 9509 - RNA, 2361 nt, Artificial Sequence
  TLR1__Homo_sapiens__AAY85633
augacuagcaucuuccauuuugccauuaucuucauguuaauacuucagaucagaauacaauuaucugaagaaagugaauuuuuaguugauaggucaaaaaacggucucauccacguuccuaaagaccuaucccagaaaacaacaaucuuaaauauaucgcaaaauuauauaucugagcuuuggacuucugacaucuuaucacugucaaaacugaggauuuugauaauuucucauaauagaauccaguaucuugauaucaguguuuucaaauucaaccaggaauuggaauacuuggauuugucccacaacaaguuggugaagauuucuugccacccuacugugaaccucaagcacuuggaccugucauuuaaugcauuugaugcccugccuauaugcaaagaguuuggcaauaugucucaacuaaaauuucugggguugagcaccacacacuuagaaaaaucuagugugcugccaauugcucauuugaauaucagcaaggucuugcuggucuuaggagagacuuauggggaaaaagaagacccugagggccuucaagacuuuaacacugagagucugcacauuguguuccccacaaacaaagaauuccauuuuauuuuggaugugucagucaagacuguagcaaaucuggaacuaucuaauaucaaaugugugcuagaagauaacaaauguucuuacuuccuaaguauucuggcgaaacuucaaacaaauccaaaguuaucaagucuuaccuuaaacaacauugaaacaacuuggaauucuuucauuaggauccuccagcugguuuggcauacaacuguaugguauuucucaauuucaaacgugaagcuacagggucagcuggacuucagagauuuugauuauucuggcacuuccuugaaggccuugucuauacaccaaguugucagcgauguguucgguuuuccgcaaaguuauaucuaugaaaucuuuucgaauaugaacaucaaaaauuucacagugucugguacacgcaugguccacaugcuuugcccauccaaaauuagcccguuccugcauuuggauuuuuccaauaaucucuuaacagacacgguuuuugaaaauugugggcaccuuacugaguuggagacacuuauuuuacaaaugaaucaauuaaaagaacuuucaaaaauagcugaaaugacuacacagaugaagucucugcaacaauuggauauuagccagaauucuguaagcuaugaugaaaagaaaggagacuguucuuggacuaaaaguuuauuaaguuuaaauaugucuucaaauauacuuacugacacuauuuucagauguuuaccucccaggaucaagguacuugaucuucacagcaauaaaauaaagagcauuccuaaacaagucguaaaacuggaagcuuugcaagaacucaauguugcuuucaauucuuuaacugaccuuccuggauguggcagcuuuagcagccuuucuguauugaucauugaucacaauucaguuucccacccaucagcugauuucuuccagagcugccagaagaugaggucaauaaaagcaggggacaauccauuccaauguaccugugagcuaggagaauuugucaaaaauauagaccaaguaucaagugaaguguuagagggcuggccugauucuuauaagugugacuacccggaaaguuauagaggaacccuacuaaaggacuuucacaugucugaauuauccugcaacauaacucugcugaucgucaccaucguugccaccaugcugguguuggcugugacugugaccucccucugcaucuacuuggaucugcccugguaucucaggauggugugccaguggacccagacccggcgcagggccaggaacauacccuuagaagaacuccaaagaaaucuccaguuucaugcauuuauuucauauagugggcacgauucuuucugggugaagaaugaauuauugccaaaccuagagaaagaagguaugcagauuugccuucaugagagaaacuuuguuccuggcaagagcauuguggaaaauaucaucaccugcauugagaagaguuacaaguccaucuuuguuuugucucccaacuuuguccagagugaauggugccauuaugaacucuacuuugcccaucacaaucucuuucaugaaggaucuaauagcuuaauccugaucuugcuggaacccauuccgcaguacuccauuccuagcaguuaucacaagcucaaaagucucauggccaggaggacuuauuuggaauggcccaaggaaaagagcaaacguggccuuuuuugggcuaacuuaagggcagccauuaauauuaagcugacagagcaagcaaagaaauag

SEQ ID NO: 9510 - RNA, 2361 nt, Artificial Sequence
  derived and/or modified sequence opt1 from TLR1__Homo_sapiens__AAY85633
augaccagcaucuuccacuucgccaucaucuucaugcugauccuccagauccgcauccagcuguccgaggagagcgaguuccugguggaccgguccaagaacggccucauccacguccccaaggaccugagccagaagaccacgauccugaacaucucccagaacuacaucagcgagcucuggaccuccgacauccugagccuguccaagcuccgcauccugaucaucagccacaaccggauccaguaccuggacaucuccguguucaaguucaaccaggagcucgaguaccuggaccugagccacaacaagcucgugaagaucuccugccacccgaccgucaaccugaagcaccuggaccucagcuucaacgccuucgacgcgcugcccaucugcaaggaguucgggaacaugucccagcugaaguuccucggccugagcaccacgcaccuggagaaguccagcgugcuccccaucgcccaccugaacaucuccaaggugcugcucguccugggggagaccuacggcgagaaggaggaccccgaggggcugcaggacuucaacaccgagagccuccacaucguguucccgaccaacaaggaguuccacuucauccuggacgugagcgucaagacgguggccaaccuggagcucuccaacaucaagugcgugcuggaggacaacaagugcagcuacuuccuguccauccucgccaagcugcagaccaaccccaagcugagcucccucacccugaacaacaucgagaccacguggaacagcuucauccgcauccugcagcucgucuggcacaccaccgugugguacuucuccaucagcaacgugaagcugcagggccagcuggacuuccgggacuucgacuacuccggcaccagccucaaggcccuguccauccaccaggucgugagcgacguguucggguucccccaguccuacaucuacgagaucuucagcaacaugaacaucaagaacuucacggucuccggcacccgcauggugcacaugcugugccccagcaagaucuccccguuccuccaccuggacuucagcaacaaccugcugaccgacaccguguucgagaacugcgggcaccucacggagcuggagacccugauccuccagaugaaccagcugaaggagcuguccaagaucgcggagaugaccacccagaugaagucccuccagcagcuggacaucagccagaacagcgucagcuacgacgagaagaagggcgacugcuccuggaccaagagccugcucucccugaacaugagcuccaacauccugaccgacaccaucuuccggugccucccgccccgcaucaaggugcuggaccugcacagcaacaagaucaaguccauccccaagcaggucgugaagcucgaggcccugcaggagcugaacguggccuucaacagccucaccgaccugcccgggugcggcuccuucagcucccugagcguccucaucaucgaccacaacuccgugagccaccccuccgccgacuucuuccagagcugccagaagaugcggagcaucaaggcgggcgacaaccccuuccagugcacgugcgagcugggggaguucgugaagaacaucgaccaggucuccagcgaggugcuggagggcuggcccgacuccuacaagugcgacuacccggagagcuaccgcgggacccuccugaaggacuuccacauguccgagcugagcugcaacaucacccuccugaucgugaccaucgucgccacgaugcuggugcucgccgugaccgucaccucccugugcaucuaccuggaccuccccugguaccugcggauggugugccaguggacccagacgcgccggcgcgcccggaacaucccccuggaggagcuccagcgcaaccugcaguuccacgccuucaucagcuacuccggccacgacagcuucugggugaagaacgagcugcuccccaaccuggagaaggagggcaugcagaucugccugcacgagcggaacuucgucccggggaaguccaucguggagaacaucaucacgugcaucgagaaguccuacaagagcaucuucgugcucagccccaacuucguccaguccgaguggugccacuacgagcuguacuucgcgcaccacaaccuguuccacgagggcagcaacucccucauccugauccugcucgagcccaucccccaguacagcaucccguccagcuaccacaagcucaagagccugauggcccgccggaccuaccuggaguggcccaaggagaaguccaagcgcgggcuguucugggccaaccugcgggccgccaucaacaucaagcucaccgagcaggcgaagaaguga

SEQ ID NO: 9511 - RNA, 2361 nt, Artificial Sequence
  derived and/or modified sequence opt2 from TLR1__Homo_sapiens__AAY85633
augaccuccaucuuccacuucgccaucaucuucaugcucauccuccagauccgcauccagcucuccgaggaguccgaguuccucgucgaccgcuccaagaacggccucauccacguccccaaggaccucucccagaagaccaccauccucaacaucucccagaacuacaucuccgagcucuggaccuccgacauccucucccucuccaagcuccgcauccucaucaucucccacaaccgcauccaguaccucgacaucuccgucuucaaguucaaccaggagcucgaguaccucgaccucucccacaacaagcucgucaagaucuccugccaccccaccgucaaccucaagcaccucgaccucuccuucaacgccuucgacgcccuccccaucugcaaggaguucggcaacaugucccagcucaaguuccucggccucuccaccacccaccucgagaaguccuccguccuccccaucgcccaccucaacaucuccaagguccuccucguccucggcgagaccuacggcgagaaggaggaccccgagggccuccaggacuucaacaccgagucccuccacaucgucuuccccaccaacaaggaguuccacuucauccucgacgucuccgucaagaccgucgccaaccucgagcucuccaacaucaagugcguccucgaggacaacaagugcuccuacuuccucuccauccucgccaagcuccagaccaaccccaagcucuccucccucacccucaacaacaucgagaccaccuggaacuccuucauccgcauccuccagcucgucuggcacaccaccgucugguacuucuccaucuccaacgucaagcuccagggccagcucgacuuccgcgacuucgacuacuccggcaccucccucaaggcccucuccauccaccaggucgucuccgacgucuucggcuucccccaguccuacaucuacgagaucuucuccaacaugaacaucaagaacuucaccgucuccggcacccgcaugguccacaugcucugccccuccaagaucucccccuuccuccaccucgacuucuccaacaaccuccucaccgacaccgucuucgagaacugcggccaccucaccgagcucgagacccucauccuccagaugaaccagcucaaggagcucuccaagaucgccgagaugaccacccagaugaagucccuccagcagcucgacaucucccagaacuccgucuccuacgacgagaagaagggcgacugcuccuggaccaagucccuccucucccucaacauguccuccaacauccucaccgacaccaucuuccgcugccuccccccccgcaucaagguccucgaccuccacuccaacaagaucaaguccauccccaagcaggucgucaagcucgaggcccuccaggagcucaacgucgccuucaacucccucaccgaccuccccggcugcggcuccuucuccucccucuccguccucaucaucgaccacaacuccgucucccaccccuccgccgacuucuuccaguccugccagaagaugcgcuccaucaaggccggcgacaaccccuuccagugcaccugcgagcucggcgaguucgucaagaacaucgaccaggucuccuccgagguccucgagggcuggcccgacuccuacaagugcgacuaccccgaguccuaccgcggcacccuccucaaggacuuccacauguccgagcucuccugcaacaucacccuccucaucgucaccaucgucgccaccaugcucguccucgccgucaccgucaccucccucugcaucuaccucgaccuccccugguaccuccgcauggucugccaguggacccagacccgccgccgcgcccgcaacaucccccucgaggagcuccagcgcaaccuccaguuccacgccuucaucuccuacuccggccacgacuccuucugggucaagaacgagcuccuccccaaccucgagaaggagggcaugcagaucugccuccacgagcgcaacuucguccccggcaaguccaucgucgagaacaucaucaccugcaucgagaaguccuacaaguccaucuucguccucucccccaacuucguccaguccgaguggugccacuacgagcucuacuucgcccaccacaaccucuuccacgagggcuccaacucccucauccucauccuccucgagcccaucccccaguacuccauccccuccuccuaccacaagcucaagucccucauggcccgccgcaccuaccucgaguggcccaaggagaaguccaagcgcggccucuucugggccaaccuccgcgccgccaucaacaucaagcucaccgagcaggccaagaaguga

SEQ ID NO: 9512 - RNA, 2361 nt, Artificial Sequence
  derived and/or modified sequence opt3 from TLR1__Homo_sapiens__AAY85633
augaccagcaucuuccacuuugccauuauauucaugcugauccuccagauuagaauccaacuuuccgaggaaucugaguuucugguggacaggucaaagaacggcuugauucauguccccaaagauuuaagucagaagacaacuauccugaauauaagccagaacuacaucuccgaacuauggacgucugacauucucucgcugucaaaacuucggauccugauuaucagccacaaucgcauacaguauuuggauauuaguguuuucaaguuuaaccaagagcucgaauaccuggaccugucccauaauaaacucgugaagaucucuugccacccuaccguaaacuuaaagcaucuggaucuuagcuucaaugcuuuugacgcauugccaauuuguaaagaguucgggaacaugucccagcugaaguuucuaggacucucaacaacucaccuggagaaaaguagcgugcuuccgaucgcccaccugaauaucucuaaggucuugcucgugcugggugaaaccuauggcgagaaagaagaucccgagggguuacaggacuucaacacagagucccugcauauuguuuuuccuaccaauaaggaguuccacuuuauacucgaugugucagucaagacuguggcgaaccuugaacugagcaauaucaaaugcguauuggaagacaacaaguguaguuacuuccuaucuauucuggcuaaacuccagacaaauccaaagcuguccagccuuacccugaacaacaucgagacgacuuggaauagcuucauacgaauuuugcaacucguuuggcauaccacagugugguauuuuucuaucuccaacgucaaacugcagggacaguuagauuuccgugacuuugauuacucaggcacuucacugaaggcccuaagcauccaccaggugguguccgacgucuucgguuuuccccaaucuuauauuuacgaaaucuucagcaauaugaacauuaaaaauuuuaccguuucagggacaagaauggugcacaugcucugcccuaguaagauauccccauuccugcaucuugacuuuagcaacaauuugcugaccgauacgguauucgagaacuguggacaccucacugagcuggaaacacuuauccugcagaugaaucaguugaaggagcucucuaaaauugcagaaaugaccacucaaaugaagucacugcagcaguuagacaucagucagaacagcguguccuacgaugagaaaaagggcgacugcucuuggacaaaaucgcugcuaagccucaauauguccucaaacauccugaccgauacgauuuuuaggugucuucccccucggauaaaggucuuggaccugcauaguaauaagaucaaaucuauuccaaagcaagugguuaaacucgaagcccugcaggaguuaaacguggcuuucaauagccugaccgaucuuccgggcugcggguccuuuaguagcuugucuguccucaucauugaccacaacuccgugagucaucccagcgcagauuucuuccagucuugucagaagaugcgcuccaucaaagccggagacaacccuuuucaaugcacaugugagcugggugaguucguaaagaauauagaucagguuucaagugaagugcuagaaggcuggccagacagcuauaagugcgacuaccccgagucguauagagggacucugcucaaagauuuucacauguccgaacugucuugcaacaucacccuuuugauugucacaaucguggcuacuaugcuggucuuagccgugaccguuacaagccucuguauuuaccuggaccuuccuugguaucugaggauggugugccaguggacccagacucggcgccgagcgagaaauaucccauuggaggagcuccaaaggaaccugcaguuccacgcauuuauaucauacaguggacaugauuccuucuggguaaagaaugaacuacugcccaaccucgagaaagaaggcaugcagauuugucugcacgagcggaauuuugucccggguaagucuaucguggagaacauuaucacgugcauagaaaaaucguauaaguccaucuucguucuuucaccuaauuuugugcagagcgaguggugucauuacgaauuguacuucgcccaccacaaccuguuucaugaggggaguaauucuuuaauucucauccugcuugaacccauuccacaauauuccaucccuagcucguaccacaagcugaaaucacuaauggcucgucgcacauaucucgaguggcccaaggagaaaucuaagagaggacuguucugggccaacuugagggcagcuauaaauauuaaacugaccgaacaggccaagaaauga

SEQ ID NO: 9513 - RNA, 2361 nt, Artificial Sequence
  derived and/or modified sequence opt4 from TLR1__Homo_sapiens__AAY85633
augaccagcaucuuccacuucgccaucaucuucaugcugauccugcagaucagaauccagcugagcgaggagagcgaguuccugguggacagaagcaagaacggccugauccacgugcccaaggaccugagccagaagaccaccauccugaacaucagccagaacuacaucagcgagcuguggaccagcgacauccugagccugagcaagcugagaauccugaucaucagccacaacagaauccaguaccuggacaucagcguguucaaguucaaccaggagcuggaguaccuggaccugagccacaacaagcuggugaagaucagcugccaccccaccgugaaccugaagcaccuggaccugagcuucaacgccuucgacgcccugcccaucugcaaggaguucggcaacaugagccagcugaaguuccugggccugagcaccacccaccuggagaagagcagcgugcugcccaucgcccaccugaacaucagcaaggugcugcuggugcugggcgagaccuacggcgagaaggaggaccccgagggccugcaggacuucaacaccgagagccugcacaucguguuccccaccaacaaggaguuccacuucauccuggacgugagcgugaagaccguggccaaccuggagcugagcaacaucaagugcgugcuggaggacaacaagugcagcuacuuccugagcauccuggccaagcugcagaccaaccccaagcugagcagccugacccugaacaacaucgagaccaccuggaacagcuucaucagaauccugcagcugguguggcacaccaccgugugguacuucagcaucagcaacgugaagcugcagggccagcuggacuucagagacuucgacuacagcggcaccagccugaaggcccugagcauccaccagguggugagcgacguguucggcuucccccagagcuacaucuacgagaucuucagcaacaugaacaucaagaacuucaccgugagcggcaccagaauggugcacaugcugugccccagcaagaucagccccuuccugcaccuggacuucagcaacaaccugcugaccgacaccguguucgagaacugcggccaccugaccgagcuggagacccugauccugcagaugaaccagcugaaggagcugagcaagaucgccgagaugaccacccagaugaagagccugcagcagcuggacaucagccagaacagcgugagcuacgacgagaagaagggcgacugcagcuggaccaagagccugcugagccugaacaugagcagcaacauccugaccgacaccaucuucagaugccugccccccagaaucaaggugcuggaccugcacagcaacaagaucaagagcauccccaagcagguggugaagcuggaggcccugcaggagcugaacguggccuucaacagccugaccgaccugcccggcugcggcagcuucagcagccugagcgugcugaucaucgaccacaacagcgugagccaccccagcgccgacuucuuccagagcugccagaagaugagaagcaucaaggccggcgacaaccccuuccagugcaccugcgagcugggcgaguucgugaagaacaucgaccaggugagcagcgaggugcuggagggcuggcccgacagcuacaagugcgacuaccccgagagcuacagaggcacccugcugaaggacuuccacaugagcgagcugagcugcaacaucacccugcugaucgugaccaucguggccaccaugcuggugcuggccgugaccgugaccagccugugcaucuaccuggaccugcccugguaccugagaauggugugccaguggacccagaccagaagaagagccagaaacaucccccuggaggagcugcagagaaaccugcaguuccacgccuucaucagcuacagcggccacgacagcuucugggugaagaacgagcugcugcccaaccuggagaaggagggcaugcagaucugccugcacgagagaaacuucgugcccggcaagagcaucguggagaacaucaucaccugcaucgagaagagcuacaagagcaucuucgugcugagccccaacuucgugcagagcgaguggugccacuacgagcuguacuucgcccaccacaaccuguuccacgagggcagcaacagccugauccugauccugcuggagcccaucccccaguacagcauccccagcagcuaccacaagcugaagagccugauggccagaagaaccuaccuggaguggcccaaggagaagagcaagagaggccuguucugggccaaccugagagccgccaucaacaucaagcugaccgagcaggccaagaaguga

SEQ ID NO: 9514 - RNA, 2361 nt, Artificial Sequence
  derived and/or modified sequence opt5 from TLR1__Homo_sapiens__AAY85633
augaccagcaucuuccacuuugccauuaucuucaugcugauucuccagauccggauucaacuguccgaggaaucugaguuucuuguggacagaagcaagaacggccugauccauguccccaaagaucucucccagaagacaacgauccugaauauuucucagaacuacaucagcgaacuuuggaccuccgacauucugucucucagcaaacugcgcauccugauuaucucccacaauagaauccaguaucucgauauuagcguuuucaaguuuaaccaagagcuggaauaccuugaccugucucauaauaaacucgugaagaucuccugccacccuacagugaaccugaagcaucuugaucugagcuucaaugcuuuugacgcccucccgauuuguaaagaguucgggaacaugucucagcugaaguuucugggacucuccaccacacaccuggagaaaagcucuguccuucccaucgcgcaccugaauauuuccaaggugcuccugguucuuggcgaaaccuauggggagaaagaagauccugagggacugcaggacuucaacacagagagccuccauaucguguuucccaccaauaaggaguuccacuuuauucuggaugucuccgugaagacgguugcuaaccuggaacucucuaauaucaaaugcgugcuggaagacaacaaguguagcuacuuccuuuccauccuggccaaacuccagaccaauccuaagcugagcucucuuacacugaacaacauugagaccacauggaauagcuucauccggauucuccaacuggucuggcauaccacggugugguauuuuagcaucucuaacgugaaacugcagggccagcucgauuuccgcgacuuugauuacagcgggacaucccugaaggcccuuucuauucaccaggucguuagcgacguguucggauuuccccaauccuauaucuacgaaaucuucagcaauaugaacauuaaaaauuuuaccgugucuggcacaagaaugguccacaugcugugcccuuccaagaucagcccguuccuccaucuggacuuuucuaacaaucugcuuaccgauaccguguucgagaacuguggccaccucacagagcuggaaacgcugauucuccagaugaaucagcugaaggagcuuuccaaaaucgcugaaaugaccacacaaaugaagucccugcagcagcucgacauuucccagaacucuguuagcuacgaugagaaaaagggggacugcuccuggaccaaaucucugcugagccuuaauauguccagcaacauccucacagauaccauuuuucggugucugcccccucgcaucaaggugcuggaccuccauucuaauaagaucaaauccauucccaagcaagucgugaaacuggaagcccuucaggagcugaacguugcuuucaauagccucacggaucugccuggaugcggcucuuuuuccagccugucugugcuuaucauugaccacaacagcgucucccaucccagcgccgauuucuuccagucuugucagaagaugagauccaucaaagcgggggacaacccguuucaaugcacaugugagcucggagaguucgugaagaauauugaucaggucagcuccgaagugcuggaaggcuggccugacucuuauaagugcgacuaccccgagagcuaucgggggacccugcucaaagauuuucacauguccgaacugucuugcaacaucacccuucugaucguuacaauuguggccaccaugcucguccuggcugugacaguuacgagccuguguaucuaccuugaccucccuugguaucugcgcauggugugccaguggacccagacaagacggcgcgccagaaauauuccccuggaggagcuccaacggaaccugcaguuccacgcuuuuaucuccuacucuggacaugauagcuucugggucaagaaugaacuucugcccaaccucgagaaagaaggcaugcagauuugucugcacgagcgcaauuuugugccuggcaaguccaucguggagaacaucauuaccugcaucgaaaagagcuauaagucuauuuucguucuguccccgaauuuuguccagagcgaguggugucauuacgaacuuuacuucgcccaccacaaccuguuucaugaggggucuaauucccucauccugauucuccuggaacccaucccucaauauagcauccccucuuccuaccacaaacuuaaaagccugauggcgagacggacauaucucgaguggccuaaggagaaauccaagagaggacuguucugggccaaccugcgcgcugccauuaauaucaaacuuaccgaacaggcuaagaaauga

SEQ ID NO: 9515 - protein, 786 aa, Artificial Sequence [sequence omitted]

SEQ ID NO: 9516 - RNA, 2361 nt, Artificial Sequence
  TLR1__Homo_sapiens__AAY85634
augacuagcaucuuccauuuugccauuaucuucauguuaauacuucagaucagaauacaauuaucugaagaaagugaauuuuuaguugauaggucaaaaaacggucucauccacguuccuaaagaccuaucccagaaaacaacaaucuuaaauauaucgcaaaauuauauaucugagcuuuggacuucugacaucuuaucacugucaaaacugaggauuuugauaauuucucauaauagaauccaguaucuugauaucaguguuuucaaauucaaccaggaauuggaauacuuggauuugucccacaacaaguuggugaagauuucuugccacccuacugugaaccucaagcacuuggaccugucauuuaaugcauuugaugcccugccuauaugcaaagaguuuggcaauaugucucaacuaaaauuucugggguugagcaccacacacuuagaaaaaucuagugugcugccaauugcucauuugaauaucagcaaggucuugcuggucuuaggagagacuuauggggaaaaagaagacccugagggccuucaagacuuuaacacugagagucugcacauuguguuccccacaaacaaagaauuccauuuuauuuuggaugugucagucaagacuguagcaaaucuggaacuaucuaauaucaaaugugugcuagaagauaacaaauguucuuacuuccuaaguauucuggcgaaacuucaaacaaauccaaaguuaucaagucuuaccuuaaacaacauugaaacaacuuggaauucuuucauuaggauccuccagcugguuuggcauacaacuguaugguauuucucaauuucaaacgugaagcuacagggucagcuggacuucagagauuuugauuauucuggcacuuccuugaaggccuugucuauacaccaaguugucagcgauguguucgguuuuccgcaaaguuauaucuaugaaaucuuuucgaauaugaacaucaaaaauuucacagugucugguacacgcaugguccacaugcuuugcccauccaaaauuagcccguuccugcauuuggauuuuuccaauaaucucuuaacagacacgguuuuugaaaauugugggcaccuuacugaguuggagacacuuauuuuacaaaugaaucaauuaaaagaacuuucaaaaauagcugaaaugacuacacagaugaagucucugcaacaauuggauauuagccagaauucuguaagcuaugaugaaaagaaaggagacuguucuuggacuaaaaguuuauuaaguuuaaauaugucuucaaauauacuuacugacacuauuuucagauguuuaccucccaggaucaagguacuugaucuucacagcaauaaaauaaagagcauuccuaaacaagucguaaaacuggaagcuuugcaagaacucaauguugcuuucaauucuuuaacugaccuuccuggauguggcagcuuuagcagccuuucuguauugaucauugaucacaauucaguuucccacccaucagcugauuucuuccagagcugccagaagaugaggucaauaaaagcaggggacaauccauuccaauguaccugugagcuaggagaauuugucaaaaauauagaccaaguaucaagugaaguguuagagggcuggccugauucuuauaagugugacuacccggaaaguuauagaggaagccuacuaaaggacuuucacaugucugaauuauccugcaacauaacucugcugaucgucaccaucguugccaccaugcugguguuggcugugacugugaccucccucugcaucuacuuggaucugcccugguaucucaggauggugugccaguggacccagacccggcgcagggccaggaacauacccuuagaagaacuccaaagaaaucuccaguuucaugcauuuauuucauauagugggcacgauucuuucugggugaagaaugaauuauugccaaaccuagagaaagaagguaugcagauuugccuucaugagagaaacuuuguuccuggcaagagcauuguggaaaauaucaucaccugcauugagaagaguuacaaguccaucuuuguuuugucucccaacuuuguccagagugaauggugccauuaugaacucuacuuugcccaucacaaucucuuucaugaaggaucuaauagcuuaauccugaucuugcuggaacccauuccgcaguacuccauuccuagcaguuaucacaagcucaaaagucucauggccaggaggacuuauuuggaauggcccaaggaaaagagcaaacguggccuuuuuugggcuaacuuaagggcagccauuaauauuaagcugacagagcaagcaaagaaauag

SEQ ID NO: 9517 - RNA, 2361 nt, Artificial Sequence
  derived and/or modified sequence opt1 from TLR1__Homo_sapiens__AAY85634
augaccagcaucuuccacuucgccaucaucuucaugcugauccuccagauccgcauccagcugagcgaggagagcgaguuccugguggaccgguccaagaacggccucauccacguccccaaggaccugagccagaagaccacgauccugaacaucucccagaacuacaucagcgagcucuggaccuccgacauccugagccuguccaagcuccgcauccugaucaucagccacaaccggauccaguaccuggacaucuccguguucaaguucaaccaggagcucgaguaccuggaccugagccacaacaagcucgugaagaucuccugccacccgaccgucaaccugaagcaccuggaccucagcuucaacgccuucgacgcgcugcccaucugcaaggaguucgggaacaugucccagcugaaguuccucggccugagcaccacgcaccuggagaaguccagcgugcuccccaucgcccaccugaacaucuccaaggugcugcucguccugggggagaccuacggcgagaaggaggaccccgaggggcugcaggacuucaacaccgagagccuccacaucguguucccgaccaacaaggaguuccacuucauccuggacgugagcgucaagacgguggccaaccuggagcucuccaacaucaagugcgugcuggaggacaacaagugcagcuacuuccuguccauccucgccaagcugcagaccaaccccaagcugagcucccucacccugaacaacaucgagaccacguggaacagcuucauccgcauccugcagcucgucuggcacaccaccgugugguacuucuccaucagcaacgugaagcugcagggccagcuggacuuccgggacuucgacuacuccggcaccagccucaaggcccuguccauccaccaggucgugagcgacguguucggguucccccaguccuacaucuacgagaucuucagcaacaugaacaucaagaacuucacggucuccggcacccgcauggugcacaugcugugccccagcaagaucuccccguuccuccaccuggacuucagcaacaaccugcugaccgacaccguguucgagaacugcgggcaccucacggagcuggagacccugauccuccagaugaaccagcugaaggagcuguccaagaucgcggagaugaccacccagaugaagucccuccagcagcuggacaucagccagaacagcgucagcuacgacgagaagaagggcgacugcuccuggaccaagagccugcucucccugaacaugagcuccaacauccugacggacaccaucuuccggugccucccgccccgcaucaaggugcuggaccugcacagcaacaagaucaaguccauccccaagcaggucgugaagcucgaggcccugcaggagcugaacguggccuucaacagccucaccgaccugcccgggugcggcuccuucagcucccugagcguccucaucaucgaccacaacuccgugagccaccccuccgccgacuucuuccagagcugccagaagaugcggagcaucaaggcgggcgacaaccccuuccagugcacgugcgagcugggggaguucgugaagaacaucgaccaggucuccagcgaggugcuggagggcuggcccgacuccuacaagugcgacuacccggagagcuaccgcgggucccuccugaaggacuuccacaugagcgagcuguccugcaacaucacccuccugaucgugaccaucgucgccaccaugcuggugcucgccgugacggucaccagccugugcaucuaccuggaccuccccugguaccugcggauggugugccaguggacccagacccgccggcgcgcccggaacaucccccuggaggagcuccagcgcaaccugcaguuccacgccuucaucuccuacagcggccacgacuccuucugggugaagaacgagcugcuccccaaccuggagaaggagggcaugcagaucugccugcacgagcggaacuucgucccgggcaagagcaucguggagaacaucaucacgugcaucgagaaguccuacaagagcaucuucgugcucucccccaacuucguccagagcgaguggugccacuacgagcuguacuucgcgcaccacaaccuguuccacgagggguccaacagccucauccugauccugcucgagcccaucccccaguacuccaucccgagcagcuaccacaagcugaagucccugauggcccgccggaccuaccucgaguggcccaaggagaaguccaagcgcgggcuguucugggccaaccugcgggccgccaucaacaucaagcucaccgagcaggcgaagaaguga

SEQ ID NO: 9518 - RNA, 2361 nt, Artificial Sequence
  derived and/or modified sequence opt2 from TLR1__Homo_sapiens__AAY85634
augaccuccaucuuccacuucgccaucaucuucaugcucauccuccagauccgcauccagcucuccgaggaguccgaguuccucgucgaccgcuccaagaacggccucauccacguccccaaggaccucucccagaagaccaccauccucaacaucucccagaacuacaucuccgagcucuggaccuccgacauccucucccucuccaagcuccgcauccucaucaucucccacaaccgcauccaguaccucgacaucuccgucuucaaguucaaccaggagcucgaguaccucgaccucucccacaacaagcucgucaagaucuccugccaccccaccgucaaccucaagcaccucgaccucuccuucaacgccuucgacgcccuccccaucugcaaggaguucggcaacaugucccagcucaaguuccucggccucuccaccacccaccucgagaaguccuccguccuccccaucgcccaccucaacaucuccaagguccuccucguccucggcgagaccuacggcgagaaggaggaccccgagggccuccaggacuucaacaccgagucccuccacaucgucuuccccaccaacaaggaguuccacuucauccucgacgucuccgucaagaccgucgccaaccucgagcucuccaacaucaagugcguccucgaggacaacaagugcuccuacuuccucuccauccucgccaagcuccagaccaaccccaagcucuccucccucacccucaacaacaucgagaccaccuggaacuccuucauccgcauccuccagcucgucuggcacaccaccgucugguacuucuccaucuccaacgucaagcuccagggccagcucgacuuccgcgacuucgacuacuccggcaccucccucaaggcccucuccauccaccaggucgucuccgacgucuucggcuucccccaguccuacaucuacgagaucuucuccaacaugaacaucaagaacuucaccgucuccggcacccgcaugguccacaugcucugccccuccaagaucucccccuuccuccaccucgacuucuccaacaaccuccucaccgacaccgucuucgagaacugcggccaccucaccgagcucgagacccucauccuccagaugaaccagcucaaggagcucuccaagaucgccgagaugaccacccagaugaagucccuccagcagcucgacaucucccagaacuccgucuccuacgacgagaagaagggcgacugcuccuggaccaagucccuccucucccucaacauguccuccaacauccucaccgacaccaucuuccgcugccuccccccccgcaucaagguccucgaccuccacuccaacaagaucaaguccauccccaagcaggucgucaagcucgaggcccuccaggagcucaacgucgccuucaacucccucaccgaccuccccggcugcggcuccuucuccucccucuccguccucaucaucgaccacaacuccgucucccaccccuccgccgacuucuuccaguccugccagaagaugcgcuccaucaaggccggcgacaaccccuuccagugcaccugcgagcucggcgaguucgucaagaacaucgaccaggucuccuccgagguccucgagggcuggcccgacuccuacaagugcgacuaccccgaguccuaccgcggcucccuccucaaggacuuccacauguccgagcucuccugcaacaucacccuccucaucgucaccaucgucgccaccaugcucguccucgccgucaccgucaccucccucugcaucuaccucgaccuccccugguaccuccgcauggucugccaguggacccagacccgccgccgcgcccgcaacaucccccucgaggagcuccagcgcaaccuccaguuccacgccuucaucuccuacuccggccacgacuccuucugggucaagaacgagcuccuccccaaccucgagaaggagggcaugcagaucugccuccacgagcgcaacuucguccccggcaaguccaucgucgagaacaucaucaccugcaucgagaaguccuacaaguccaucuucguccucucccccaacuucguccaguccgaguggugccacuacgagcucuacuucgcccaccacaaccucuuccacgagggcuccaacucccucauccucauccuccucgagcccaucccccaguacuccauccccuccuccuaccacaagcucaagucccucauggcccgccgcaccuaccucgaguggcccaaggagaaguccaagcgcggccucuucugggccaaccuccgcgccgccaucaacaucaagcucaccgagcaggccaagaaguga

SEQ ID NO: 9519 - RNA, 2361 nt, Artificial Sequence
  derived and/or modified sequence opt3 from TLR1__Homo_sapiens__AAY85634
augaccagcaucuuccacuuugccauuauauucaugcugauccuccagauuagaauccaacuuuccgaggaaucugaguuucugguggacaggucaaagaacggcuugauucauguccccaaagauuuaagucagaagacaacuauccugaauauaagccagaacuacaucuccgaacuauggacgucugacauucucucgcugucaaaacuucggauccugauuaucagccacaaucgcauacaguauuuggauauuaguguuuucaaguuuaaccaagagcucgaauaccuggaccugucccauaauaaacucgugaagaucucuugccacccuaccguaaacuuaaagcaucuggaucuuagcuucaaugcuuuugacgcauugccaauuuguaaagaguucgggaacaugucccagcugaaguuucuaggacucucaacaacucaccuggagaaaaguagcgugcuuccgaucgcccaccugaauaucucuaaggucuugcucgugcugggugaaaccuauggcgagaaagaagaucccgagggguuacaggacuucaacacagagucccugcauauuguuuuuccuaccaauaaggaguuccacuuuauacucgaugugucagucaagacuguggcgaaccuugaacugagcaauaucaaaugcguauuggaagacaacaaguguaguuacuuccuaucuauucuggcuaaacuccagacaaauccaaagcuguccagccuuacccugaacaacaucgagacgacuuggaacucguucauacgaauuuugcaacucguuuggcauaccacagugugguauuuuucuaucuccaaugucaaacugcagggacaguuagauuuccgugacuuugauuacucaggcacuucacugaaggcccuaagcauccaccaggugguguccgacgucuucgguuuuccccaaucuuauauuuacgaaaucuucagcaauaugaacauuaaaaauuuuaccguuucagggacaagaauggugcacaugcucugcccuaguaagauauccccauuccugcaucuugacuuuagcaacaauuugcugaccgauacgguauucgagaacuguggacaccucacugagcuggaaacacuuauccugcagaugaaucaguugaaggagcucucuaaaauugcagaaaugaccacucaaaugaagucacugcagcaguuagacaucagucagaacagcguguccuacgaugagaaaaagggcgacugcucuuggacaaaaucgcugcuaagccucaauauguccucaaacauccugaccgauacgauuuuuaggugucuucccccucggauaaaggucuuggaccugcauaguaauaagaucaaaucuauuccaaagcaagugguuaaacucgaagcccugcaggaguuaaacguggcuuucaauagccugaccgaucuuccgggcugcggguccuuuaguagcuugucuguccucaucauugaccacaacuccgugagucaucccagcgcagauuucuuccagucuugucagaagaugcgcuccaucaaagccggagacaacccuuuucaaugcacaugugagcugggugaguucguaaagaauauagaucagguuucaagugaagugcuagaaggcuggccagacagcuauaagugcgacuaccccgagucguauagagggucccugcucaaagauuuucacaugucugaacugagcugcaacaucacucuuuugauugucaccaucguggcuacaaugcuggucuuagccgugacuguuaccucacucuguauuuaccuggaccuuccuugguaucugaggauggugugccaguggacacagacccggcgccgagcgagaaauaucccauuggaggagcuccaaaggaaccugcaguuccacgcauuuauaaguuacuccggacaugauucuuucuggguaaagaaugaacuacugcccaaccucgagaaagaaggcaugcagauuugucugcacgagcggaauuuugucccggguaagagcaucguggagaacauuaucacuugcauagaaaaauccuauaagucaaucuucguucuuagcccuaauuuugugcagagugaguggugucauuacgaauuguacuucgcccaccacaaccuguuucaugaggggucuaauuccuuaauucucauccugcuugaacccauuccacaauauagcaucccuucgucauaccacaagcugaaaucucuaauggcucgucgcacguaucucgaguggcccaaggagaaaaguaagagaggacuguucugggccaacuugagggcagcuauaaauauuaaacugacagaacaggccaagaaauga

SEQ ID NO: 9520 - RNA, 2361 nt, Artificial Sequence
  derived and/or modified sequence opt4 from TLR1__Homo_sapiens__AAY85634
augaccagcaucuuccacuucgccaucaucuucaugcugauccugcagaucagaauccagcugagcgaggagagcgaguuccugguggacagaagcaagaacggccugauccacgugcccaaggaccugagccagaagaccaccauccugaacaucagccagaacuacaucagcgagcuguggaccagcgacauccugagccugagcaagcugagaauccugaucaucagccacaacagaauccaguaccuggacaucagcguguucaaguucaaccaggagcuggaguaccuggaccugagccacaacaagcuggugaagaucagcugccaccccaccgugaaccugaagcaccuggaccugagcuucaacgccuucgacgcccugcccaucugcaaggaguucggcaacaugagccagcugaaguuccugggccugagcaccacccaccuggagaagagcagcgugcugcccaucgcccaccugaacaucagcaaggugcugcuggugcugggcgagaccuacggcgagaaggaggaccccgagggccugcaggacuucaacaccgagagccugcacaucguguuccccaccaacaaggaguuccacuucauccuggacgugagcgugaagaccguggccaaccuggagcugagcaacaucaagugcgugcuggaggacaacaagugcagcuacuuccugagcauccuggccaagcugcagaccaaccccaagcugagcagccugacccugaacaacaucgagaccaccuggaacagcuucaucagaauccugcagcugguguggcacaccaccgugugguacuucagcaucagcaacgugaagcugcagggccagcuggacuucagagacuucgacuacagcggcaccagccugaaggcccugagcauccaccagguggugagcgacguguucggcuucccccagagcuacaucuacgagaucuucagcaacaugaacaucaagaacuucaccgugagcggcaccagaauggugcacaugcugugccccagcaagaucagccccuuccugcaccuggacuucagcaacaaccugcugaccgacaccguguucgagaacugcggccaccugaccgagcuggagacccugauccugcagaugaaccagcugaaggagcugagcaagaucgccgagaugaccacccagaugaagagccugcagcagcuggacaucagccagaacagcgugagcuacgacgagaagaagggcgacugcagcuggaccaagagccugcugagccugaacaugagcagcaacauccugaccgacaccaucuucagaugccugccccccagaaucaaggugcuggaccugcacagcaacaagaucaagagcauccccaagcagguggugaagcuggaggcccugcaggagcugaacguggccuucaacagccugaccgaccugcccggcugcggcagcuucagcagccugagcgugcugaucaucgaccacaacagcgugagccaccccagcgccgacuucuuccagagcugccagaagaugagaagcaucaaggccggcgacaaccccuuccagugcaccugcgagcugggcgaguucgugaagaacaucgaccaggugagcagcgaggugcuggagggcuggcccgacagcuacaagugcgacuaccccgagagcuacagaggcagccugcugaaggacuuccacaugagcgagcugagcugcaacaucacccugcugaucgugaccaucguggccaccaugcuggugcuggccgugaccgugaccagccugugcaucuaccuggaccugcccugguaccugagaauggugugccaguggacccagaccagaagaagagccagaaacaucccccuggaggagcugcagagaaaccugcaguuccacgccuucaucagcuacagcggccacgacagcuucugggugaagaacgagcugcugcccaaccuggagaaggagggcaugcagaucugccugcacgagagaaacuucgugcccggcaagagcaucguggagaacaucaucaccugcaucgagaagagcuacaagagcaucuucgugcugagccccaacuucgugcagagcgaguggugccacuacgagcuguacuucgcccaccacaaccuguuccacgagggcagcaacagccugauccugauccugcuggagcccaucccccaguacagcauccccagcagcuaccacaagcugaagagccugauggccagaagaaccuaccuggaguggcccaaggagaagagcaagagaggccuguucugggccaaccugagagccgccaucaacaucaagcugaccgagcaggccaagaaguga

SEQ ID NO: 9521 - RNA, 2361 nt, Artificial Sequence
  derived and/or modified sequence opt5 from TLR1__Homo_sapiens__AAY85634
augaccagcaucuuccacuuugccauuaucuucaugcugauucuccagauccggauucaacuguccgaggaaucugaguuucuuguggacagaagcaagaacggccugauccauguccccaaagaucucucccagaagacaacgauccugaauauuucucagaacuacaucagcgaacuuuggaccuccgacauucugucucucagcaaacugcgcauccugauuaucucccacaauagaauccaguaucucgauauuagcguuuucaaguuuaaccaagagcuggaauaccuugaccugucucauaauaaacucgugaagaucuccugccacccuacagugaaccugaagcaucuugaucugagcuucaaugcuuuugacgcccucccgauuuguaaagaguucgggaacaugucucagcugaaguuucugggacucuccaccacacaccuggagaaaagcucuguccuucccaucgcgcaccugaauauuuccaaggugcuccugguucuuggcgaaaccuauggggagaaagaagauccugagggacugcaggacuucaacacagagagccuccauaucguguuucccaccaauaaggaguuccacuuuauucuggaugucuccgugaagacgguugcuaaccuggaacucucuaauaucaaaugcgugcuggaagacaacaaguguagcuacuuccuuuccauccuggccaaacuccagaccaauccuaagcugagcucucuuacacugaacaacauugagaccacauggaauagcuucauccggauucuccaacuggucuggcauaccacggugugguauuuuagcaucucuaacgugaaacugcagggccagcucgauuuccgcgacuuugauuacagcgggacaucccugaaggcccuuucuauucaccaggucguuagcgacguguucggauuuccccaauccuauaucuacgaaaucuucagcaauaugaacauuaaaaauuuuaccgugucuggcacaagaaugguccacaugcugugcccuuccaagaucagcccguuccuccaucuggacuuuucuaacaaucugcuuaccgauaccguguucgagaacuguggccaccucacagagcuggaaacgcugauucuccagaugaaucagcugaaggagcuuuccaaaaucgcugaaaugaccacacaaaugaagucccugcagcagcucgacauuucccagaacucuguuagcuacgaugagaaaaagggggacugcuccuggaccaaaucucugcugagccuuaauauguccagcaacauccucacagauaccauuuuucggugucugcccccucgcaucaaggugcuggaccuccauucuaauaagaucaaauccauucccaagcaagucgugaaacuggaagcccuucaggagcugaacguugcuuucaauagccucacggaucugccuggaugcggcucuuuuuccagccugucugugcuuaucauugaccacaacagcgucucccaucccagcgccgauuucuuccagucuugucagaagaugagauccaucaaagcgggggacaacccguuucaaugcacaugugagcucggagaguucgugaagaauauugaucaggucagcuccgaagugcuggaaggcuggccugacucuuauaagugcgacuaccccgagagcuaucgggggucccugcucaaagauuuucacaugucugaacugagcugcaacaucacccuucugaucguuaccauuguggccacaaugcucguccuggcugugaccguuacaucccuguguaucuaccuugaccucccuugguaucugcgcauggugugccaguggacgcagaccagacggcgcgccagaaauauuccccuggaggagcuccaacggaaccugcaguuccacgcuuuuaucucuuacagcggacaugauuccuucugggucaagaaugaacuucugcccaaccucgagaaagaaggcaugcagauuugucugcacgagcgcaauuuugugccuggcaagagcaucguggagaacaucauuacaugcaucgaaaaaucuuauaaguccauuuucguucugagcccgaauuuuguccagucugaguggugucauuacgaacuuuacuucgcccaccacaaccuguuucaugagggguccaauagccucauccugauucuccuggaacccaucccucaauauucuauccccuccagcuaccacaaacuuaagucccugauggcgagacggaccuaucucgaguggccuaaggagaaaagcaagagaggacuguucugggccaaccugcgcgcugccauuaauaucaaacuuacagaacaggcuaagaaauga

SEQ ID NO: 9522 - protein, 786 aa, Artificial Sequence [sequence omitted]

SEQ ID NO: 9523 - RNA, 2361 nt, Artificial Sequence
  TLR1__Homo_sapiens__AAY85635
augacuagcaucuuccauuuugccauuaucuucauguuaauacuucagaucagaauacaauuaucugaagaaagugaauuuuuaguugauaggucaaaaaacggucucauccacguuccuaaagaccuaucccagaaaacaacaaucuuaaauauaucgcaaaauuauauaucugagcuuuggacuucugacaucuuaucacugucaaaacugaggauuuugauaauuucucauaauagaauccaguaucuugauaucaguguuuucaaauucaaccaggaauuggaauacuuggauuugucccacaacaaguuggugaagauuucuugccacccuacugugaaccucaagcacuuggaccugucauuuaaugcauuugaugcccugccuauaugcaaagaguuuggcaauaugucucaacuaaaauuucugggguugagcaccacacacuuagaaaaaucuagugugcugccaauugcucauuugaauaucagcaaggucuugcuggucuuaggagagacuuauggggaaaaagaagacccugagggccuucaagacuuuaacacugagagucugcacauuguguuccccacaaacaaagaauuccauuuuauuuuggaugugucagucaagacuguagcaaaucuggaacuaucuaauaucaaaugugugcuagaagauaacaaauguucuuacuuccuaaguauucuggcgaaacuucaaacaaauccaaaguuaucaagucuuaccuuaaacaacauugaaacaacuuggaauucuuucauuaggauccuccagcugguuuggcauacaacuguaugguauuucucaauuucaaacgugaagcuacagggucagcuggacuucagagauuuugauuauucuggcacuuccuugaaggccuugucuauacaccaaguugucagcgauguguucgguuuuccgcaaaguuauaucuaugaaaucuuuucgaauaugaacaucaaaaauuucacagugucugguacacgcaugguccacaugcuuugcccauccaaaauuagcccguuccugcauuuggauuuuuccaauaaucucuuaacagacacgguuuuugaaaauugugggcaccuuacugaguuggagacacuuauuuuacaaaugaaucaauuaaaagaacuuucaaaaauagcugaaaugacuacacagaugaagucucugcaacaauuggauauuagccagaauucuguaagcuaugaugaaaagaaaggagacuguucuuggacuaaaaguuuauuaaguuuaaauaugucuucaaauauacuuacugacacuauuuucagauguuuaccucccaggaucaagguacuugaucuucacagcaauaaaauaaagagcauuccuaaacaagucguaaaacuggaagcuuugcaagaacucaauguugcuuucaauucuuuaacugaccuuccuggauguggcagcuuuagcagccuuucuguauugaucauugaucacaauucaguuucccacccaucagcugauuucuuccagagcugccagaagaugaggucaauaaaagcaggggacaauccauuccaauguaccugugagcuaggagaauuugucaaaaauauagaccaagcaucaagugaaguguuagagggcuggccugauucuuauaagugugacuacccggaaaguuauagaggaacccuacuaaaggacuuucacaugucugaauuauccugcaacauaacucugcugaucgucaccaucguugccaccaugcugguguuggcugugacugugaccucccucugcaucuacuuggaucugcccugguaucucaggauggugugccaguggacccagacccggcgcagggccaggaacauacccuuagaagaacuccaaagaaaucuccaguuucaugcauuuauuucauauagugggcacgauucuuucugggugaagaaugaauuauugccaaaccuagagaaagaagguaugcagauuugccuucaugagagaaacuuuguuccuggcaagagcauuguggaaaauaucaucaccugcauugagaagaguuacaaguccaucuuuguuuugucucccaacuuuguccagagugaauggugccauuaugaacucuacuuugcccaucacaaucucuuucaugaaggaucuaauagcuuaauccugaucuugcuggaacccauuccgcaguacuccauuccuagcaguuaucacaagcucaaaagucucauggccaggaggacuuauuuggaauggcccaaggaaaagagcaaacguggccuuuuuugggcuaacuuaagggcagccauuaauauuaagcugacagagcaagcaaagaaauag

SEQ ID NO: 9524 - RNA, 2361 nt, Artificial Sequence
  derived and/or modified sequence opt1 from TLR1__Homo_sapiens__AAY85635
augaccagcaucuuccacuucgccaucaucuucaugcugauccuccagauccgcauccagcuguccgaggagagcgaguuccugguggaccgguccaagaacggccucauccacguccccaaggaccugagccagaagaccacgauccugaacaucucccagaacuacaucagcgagcucuggaccuccgacauccugagccuguccaagcuccgcauccugaucaucagccacaaccggauccaguaccuggacaucuccguguucaaguucaaccaggagcucgaguaccuggaccugagccacaacaagcucgugaagaucuccugccacccgaccgucaaccugaagcaccuggaccucagcuucaacgccuucgacgcgcugcccaucugcaaggaguucgggaacaugucccagcugaaguuccucggccugagcaccacgcaccuggagaaguccagcgugcuccccaucgcccaccugaacaucuccaaggugcugcucguccugggggagaccuacggcgagaaggaggaccccgaggggcugcaggacuucaacaccgagagccuccacaucguguucccgaccaacaaggaguuccacuucauccuggacgugagcgucaagacgguggccaaccuggagcucuccaacaucaagugcgugcuggaggacaacaagugcagcuacuuccuguccauccucgccaagcugcagaccaaccccaagcugagcucccucacccugaacaacaucgagaccacguggaacagcuucauccgcauccugcagcucgucuggcacaccaccgugugguacuucuccaucagcaacgugaagcugcagggccagcuggacuuccgggacuucgacuacuccggcaccagccucaaggcccuguccauccaccaggucgugagcgacguguucggguucccccaguccuacaucuacgagaucuucagcaacaugaacaucaagaacuucacggucuccggcacccgcauggugcacaugcugugccccagcaagaucuccccguuccuccaccuggacuucagcaacaaccugcugaccgacaccguguucgagaacugcgggcaccucacggagcuggagacccugauccuccagaugaaccagcugaaggagcuguccaagaucgcggagaugaccacccagaugaagucccuccagcagcuggacaucagccagaacagcgucagcuacgacgagaagaagggcgacugcuccuggaccaagagccugcucucccugaacaugagcuccaacauccugaccgacaccaucuuccggugccucccgccccgcaucaaggugcuggaccugcacagcaacaagaucaaguccauccccaagcaggucgugaagcucgaggcccugcaggagcugaacguggccuucaacagccucaccgaccugcccgggugcggcuccuucagcucccugagcguccucaucaucgaccacaacuccgugagccaccccuccgccgacuucuuccagagcugccagaagaugcggagcaucaaggcgggcgacaaccccuuccagugcacgugcgagcugggggaguucgugaagaacaucgaccaggccuccagcgagguccuggagggcuggcccgacuccuacaagugcgacuacccggagagcuaccgcgggacccuccugaaggacuuccacauguccgagcugagcugcaacaucacccuccugaucgugaccaucguggccacgaugcugguccucgccgugaccgugaccucccugugcaucuaccuggaccuccccugguaccugcggauggucugccaguggacccagacgcgccggcgcgcccggaacaucccccuggaggagcuccagcgcaaccugcaguuccacgcguucaucagcuacuccggccacgacagcuucugggugaagaacgagcugcuccccaaccuggagaaggagggcaugcagaucugccugcacgagcggaacuucgugccggggaaguccaucgucgagaacaucaucacgugcaucgagaaguccuacaagagcaucuucgugcucagccccaacuucgugcaguccgaguggugccacuacgagcuguacuucgcccaccacaaccuguuccacgagggcagcaacucccucauccugauccugcucgagcccaucccccaguacagcaucccguccagcuaccacaagcucaagagccugauggcccgccggaccuaccuggaguggcccaaggagaaguccaagcgcgggcuguucugggccaaccugcgggccgcgaucaacaucaagcucaccgagcaggccaagaaguga

SEQ ID NO: 9525 - RNA, 2361 nt, Artificial Sequence
  derived and/or modified sequence opt2 from TLR1__Homo_sapiens__AAY85635
augaccuccaucuuccacuucgccaucaucuucaugcucauccuccagauccgcauccagcucuccgaggaguccgaguuccucgucgaccgcuccaagaacggccucauccacguccccaaggaccucucccagaagaccaccauccucaacaucucccagaacuacaucuccgagcucuggaccuccgacauccucucccucuccaagcuccgcauccucaucaucucccacaaccgcauccaguaccucgacaucuccgucuucaaguucaaccaggagcucgaguaccucgaccucucccacaacaagcucgucaagaucuccugccaccccaccgucaaccucaagcaccucgaccucuccuucaacgccuucgacgcccuccccaucugcaaggaguucggcaacaugucccagcucaaguuccucggccucuccaccacccaccucgagaaguccuccguccuccccaucgcccaccucaacaucuccaagguccuccucguccucggcgagaccuacggcgagaaggaggaccccgagggccuccaggacuucaacaccgagucccuccacaucgucuuccccaccaacaaggaguuccacuucauccucgacgucuccgucaagaccgucgccaaccucgagcucuccaacaucaagugcguccucgaggacaacaagugcuccuacuuccucuccauccucgccaagcuccagaccaaccccaagcucuccucccucacccucaacaacaucgagaccaccuggaacuccuucauccgcauccuccagcucgucuggcacaccaccgucugguacuucuccaucuccaacgucaagcuccagggccagcucgacuuccgcgacuucgacuacuccggcaccucccucaaggcccucuccauccaccaggucgucuccgacgucuucggcuucccccaguccuacaucuacgagaucuucuccaacaugaacaucaagaacuucaccgucuccggcacccgcaugguccacaugcucugccccuccaagaucucccccuuccuccaccucgacuucuccaacaaccuccucaccgacaccgucuucgagaacugcggccaccucaccgagcucgagacccucauccuccagaugaaccagcucaaggagcucuccaagaucgccgagaugaccacccagaugaagucccuccagcagcucgacaucucccagaacuccgucuccuacgacgagaagaagggcgacugcuccuggaccaagucccuccucucccucaacauguccuccaacauccucaccgacaccaucuuccgcugccuccccccccgcaucaagguccucgaccuccacuccaacaagaucaaguccauccccaagcaggucgucaagcucgaggcccuccaggagcucaacgucgccuucaacucccucaccgaccuccccggcugcggcuccuucuccucccucuccguccucaucaucgaccacaacuccgucucccaccccuccgccgacuucuuccaguccugccagaagaugcgcuccaucaaggccggcgacaaccccuuccagugcaccugcgagcucggcgaguucgucaagaacaucgaccaggccuccuccgagguccucgagggcuggcccgacuccuacaagugcgacuaccccgaguccuaccgcggcacccuccucaaggacuuccacauguccgagcucuccugcaacaucacccuccucaucgucaccaucgucgccaccaugcucguccucgccgucaccgucaccucccucugcaucuaccucgaccuccccugguaccuccgcauggucugccaguggacccagacccgccgccgcgcccgcaacaucccccucgaggagcuccagcgcaaccuccaguuccacgccuucaucuccuacuccggccacgacuccuucugggucaagaacgagcuccuccccaaccucgagaaggagggcaugcagaucugccuccacgagcgcaacuucguccccggcaaguccaucgucgagaacaucaucaccugcaucgagaaguccuacaaguccaucuucguccucucccccaacuucguccaguccgaguggugccacuacgagcucuacuucgcccaccacaaccucuuccacgagggcuccaacucccucauccucauccuccucgagcccaucccccaguacuccauccccuccuccuaccacaagcucaagucccucauggcccgccgcaccuaccucgaguggcccaaggagaaguccaagcgcggccucuucugggccaaccuccgcgccgccaucaacaucaagcucaccgagcaggccaagaaguga

SEQ ID NO: 9526 - RNA, 2361 nt, Artificial Sequence
  derived and/or modified sequence opt3 from TLR1__Homo_sapiens__AAY85635
augaccagcaucuuccacuuugccauuauauucaugcugauccuccagauuagaauccaacuuuccgaggaaucugaguuucugguggacaggucaaagaacggcuugauucauguccccaaagauuuaagucagaagacaacuauccugaauauaagccagaacuacaucuccgaacuauggacgucugacauucucucgcugucaaaacuucggauccugauuaucagccacaaucgcauacaguauuuggauauuaguguuuucaaguuuaaccaagagcucgaauaccuggaccugucccauaauaaacucgugaagaucucuugccacccuaccguaaacuuaaagcaucuggaucuuagcuucaaugcuuuugacgcauugccaauuuguaaagaguucgggaacaugucccagcugaaguuucuaggacucucaacaacucaccuggagaaaaguagcgugcuuccgaucgcccaccugaauaucucuaaggucuugcucgugcugggugaaaccuauggcgagaaagaagaucccgagggguuacaggacuucaacacagagucccugcauauuguuuuuccuaccaauaaggaguuccacuuuauacucgaugugucagucaagacuguggcgaaccuugaacugagcaauaucaaaugcguauuggaagacaacaaguguaguuacuuccuaucuauucuggcuaaacuccagacaaauccaaagcuguccagccuuacccugaacaacaucgagacgacuuggaauagcuucauacgaauuuugcaacucguuuggcauaccacagugugguauuuuucuaucuccaacgucaaacugcagggacaguuagauuuccgugacuuugauuacucaggcacuucacugaaggcccuaagcauccaccaggugguguccgacgucuucgguuuuccccaaucuuauauuuacgaaaucuucagcaauaugaacauuaaaaauuuuaccguuucagggacaagaauggugcacaugcucugcccuaguaagauauccccauuccugcaucuugacuuuagcaacaauuugcugaccgauacgguauucgagaacuguggacaccucacugagcuggaaacacuuauccugcagaugaaucaguugaaggagcucucuaaaauugcagaaaugaccacucaaaugaagucacugcagcaguuagacaucagucagaacagcguguccuacgaugagaaaaagggcgacugcucuuggacaaaaucgcugcuaagccucaauauguccucaaacauccugaccgauacgauuuuuaggugucuucccccucggauaaaggucuuggaccugcauaguaauaagaucaaaucuauuccaaagcaagugguuaaacucgaagcccugcaggaguuaaacguggcuuucaauagccugaccgaucuuccgggcugcggguccuuuaguagcuugucuguccucaucauugaccacaacuccgugagucaucccagcgcagauuucuuccagucuugucagaagaugcgcuccaucaaagccggagacaacccuuuucaaugcacaugugagcugggugaguucguaaagaauauagaucaggcuucaagugaaguucuagaaggcuggccagacagcuauaagugcgacuaccccgagucguauagagggacucugcucaaagauuuucacauguccgaacugucuugcaacaucacccuuuugauugugacaaucgucgccacuaugcugguguuagcggucaccgugacaagccucuguauuuaccuggaccuuccuugguaucugaggaugguuugccaguggacccagacucggcgccgagcaagaaauaucccauuggaggagcuccaaaggaaccugcaguuccacgccuuuauaucauacaguggacaugauuccuucugggugaagaaugaacuacugcccaaccucgagaaagaaggcaugcagauuugucugcacgagcggaauuuuguaccggguaagucuaucgucgagaacauuaucacgugcauagaaaaaucguauaaguccaucuucgugcuuucaccuaauuuuguucagagcgaguggugucauuacgaauuguacuucgcucaccacaaccuguuucaugaggggaguaauucuuuaauucucauccugcuugaacccauuccacaauauuccaucccuagcucguaccacaagcugaaaucacuaauggcccgucgcacauaucucgaguggcccaaggagaaaucuaagagaggacuguucugggcaaacuugagggcugccauaaauauuaaacugaccgaacaggcgaagaaauga

SEQ ID NO: 9527 - RNA, 2361 nt, Artificial Sequence
  derived and/or modified sequence opt4 from TLR1__Homo_sapiens__AAY85635
augaccagcaucuuccacuucgccaucaucuucaugcugauccugcagaucagaauccagcugagcgaggagagcgaguuccugguggacagaagcaagaacggccugauccacgugcccaaggaccugagccagaagaccaccauccugaacaucagccagaacuacaucagcgagcuguggaccagcgacauccugagccugagcaagcugagaauccugaucaucagccacaacagaauccaguaccuggacaucagcguguucaaguucaaccaggagcuggaguaccuggaccugagccacaacaagcuggugaagaucagcugccaccccaccgugaaccugaagcaccuggaccugagcuucaacgccuucgacgcccugcccaucugcaaggaguucggcaacaugagccagcugaaguuccugggccugagcaccacccaccuggagaagagcagcgugcugcccaucgcccaccugaacaucagcaaggugcugcuggugcugggcgagaccuacggcgagaaggaggaccccgagggccugcaggacuucaacaccgagagccugcacaucguguuccccaccaacaaggaguuccacuucauccuggacgugagcgugaagaccguggccaaccuggagcugagcaacaucaagugcgugcuggaggacaacaagugcagcuacuuccugagcauccuggccaagcugcagaccaaccccaagcugagcagccugacccugaacaacaucgagaccaccuggaacagcuucaucagaauccugcagcugguguggcacaccaccgugugguacuucagcaucagcaacgugaagcugcagggccagcuggacuucagagacuucgacuacagcggcaccagccugaaggcccugagcauccaccagguggugagcgacguguucggcuucccccagagcuacaucuacgagaucuucagcaacaugaacaucaagaacuucaccgugagcggcaccagaauggugcacaugcugugccccagcaagaucagccccuuccugcaccuggacuucagcaacaaccugcugaccgacaccguguucgagaacugcggccaccugaccgagcuggagacccugauccugcagaugaaccagcugaaggagcugagcaagaucgccgagaugaccacccagaugaagagccugcagcagcuggacaucagccagaacagcgugagcuacgacgagaagaagggcgacugcagcuggaccaagagccugcugagccugaacaugagcagcaacauccugaccgacaccaucuucagaugccugccccccagaaucaaggugcuggaccugcacagcaacaagaucaagagcauccccaagcagguggugaagcuggaggcccugcaggagcugaacguggccuucaacagccugaccgaccugcccggcugcggcagcuucagcagccugagcgugcugaucaucgaccacaacagcgugagccaccccagcgccgacuucuuccagagcugccagaagaugagaagcaucaaggccggcgacaaccccuuccagugcaccugcgagcugggcgaguucgugaagaacaucgaccaggccagcagcgaggugcuggagggcuggcccgacagcuacaagugcgacuaccccgagagcuacagaggcacccugcugaaggacuuccacaugagcgagcugagcugcaacaucacccugcugaucgugaccaucguggccaccaugcuggugcuggccgugaccgugaccagccugugcaucuaccuggaccugcccugguaccugagaauggugugccaguggacccagaccagaagaagagccagaaacaucccccuggaggagcugcagagaaaccugcaguuccacgccuucaucagcuacagcggccacgacagcuucugggugaagaacgagcugcugcccaaccuggagaaggagggcaugcagaucugccugcacgagagaaacuucgugcccggcaagagcaucguggagaacaucaucaccugcaucgagaagagcuacaagagcaucuucgugcugagccccaacuucgugcagagcgaguggugccacuacgagcuguacuucgcccaccacaaccuguuccacgagggcagcaacagccugauccugauccugcuggagcccaucccccaguacagcauccccagcagcuaccacaagcugaagagccugauggccagaagaaccuaccuggaguggcccaaggagaagagcaagagaggccuguucugggccaaccugagagccgccaucaacaucaagcugaccgagcaggccaagaaguga

SEQ ID NO: 9528 - RNA, 2361 nt, Artificial Sequence
  derived and/or modified sequence opt5 from TLR1__Homo_sapiens__AAY85635
augaccagcaucuuccacuuugccauuaucuucaugcugauucuccagauccggauucaacuguccgaggaaucugaguuucuuguggacagaagcaagaacggccugauccauguccccaaagaucucucccagaagacaacgauccugaauauuucucagaacuacaucagcgaacuuuggaccuccgacauucugucucucagcaaacugcgcauccugauuaucucccacaauagaauccaguaucucgauauuagcguuuucaaguuuaaccaagagcuggaauaccuugaccugucucauaauaaacucgugaagaucuccugccacccuacagugaaccugaagcaucuugaucugagcuucaaugcuuuugacgcccucccgauuuguaaagaguucgggaacaugucucagcugaaguuucugggacucuccaccacacaccuggagaaaagcucuguccuucccaucgcgcaccugaauauuuccaaggugcuccugguucuuggcgaaaccuauggggagaaagaagauccugagggacugcaggacuucaacacagagagccuccauaucguguuucccaccaauaaggaguuccacuuuauucuggaugucuccgugaagacgguugcuaaccuggaacucucuaauaucaaaugcgugcuggaagacaacaaguguagcuacuuccuuuccauccuggccaaacuccagaccaauccuaagcugagcucucuuacacugaacaacauugagaccacauggaauagcuucauccggauucuccaacuggucuggcauaccacggugugguauuuuagcaucucuaacgugaaacugcagggccagcucgauuuccgcgacuuugauuacagcgggacaucccugaaggcccuuucuauucaccaggucguuagcgacguguucggauuuccccaauccuauaucuacgaaaucuucagcaauaugaacauuaaaaauuuuaccgugucuggcacaagaaugguccacaugcugugcccuuccaagaucagcccguuccuccaucuggacuuuucuaacaaucugcuuaccgauaccguguucgagaacuguggccaccucacagagcuggaaacgcugauucuccagaugaaucagcugaaggagcuuuccaaaaucgcugaaaugaccacacaaaugaagucccugcagcagcucgacauuucccagaacucuguuagcuacgaugagaaaaagggggacugcuccuggaccaaaucucugcugagccuuaauauguccagcaacauccucacagauaccauuuuucggugucugcccccucgcaucaaggugcuggaccuccauucuaauaagaucaaauccauucccaagcaagucgugaaacuggaagcccuucaggagcugaacguugcuuucaauagccucacggaucugccuggaugcggcucuuuuuccagccugucugugcuuaucauugaccacaacagcgucucccaucccagcgccgauuucuuccagucuugucagaagaugagauccaucaaagcgggggacaacccguuucaaugcacaugugagcucggagaguucgugaagaauauugaucaggccagcuccgaaguccuggaaggcuggccugacucuuauaagugcgacuaccccgagagcuaucgggggacccugcucaaagauuuucacauguccgaacugucuugcaacaucacccuucugaucgugacaauuguugcuaccaugcucgugcuggccgucacagugacgagccuguguaucuaccuugaccucccuugguaucugcgcaugguuugccaguggacccagacaagacggcgcgcuagaaauauuccccuggaggagcuccaacggaaccugcaguuccacgccuuuaucuccuacucuggacaugauagcuucugggugaagaaugaacuucugcccaaccucgagaaagaaggcaugcagauuugucugcacgagcgcaauuuugucccuggcaaguccaucguggagaacaucauuaccugcaucgaaaagagcuauaagucuauuuucgugcuguccccgaauuuuguucagagcgaguggugucauuacgaacuuuacuucgcgcaccacaaccuguuucaugaggggucuaauucccucauccugauucuccuggaacccaucccucaauauagcauccccucuuccuaccacaaacuuaaaagccugauggccagacggacauaucucgaguggccuaaggagaaauccaagagaggacuguucugggcuaaccugcgcgccgcuauuaauaucaaacuuaccgaacaggccaagaaauga

SEQ ID NO: 9529 - protein, 786 aa, Artificial Sequence [sequence omitted]

SEQ ID NO: 9530 - RNA, 2361 nt, Artificial Sequence
  TLR1__Homo_sapiens__AAY85637
augacuagcaucuuccauuuugccauuaucuucauguuaauacuucagaucagaauacaauuaucugaagaaagugaauuuuuaguugauaggucaaaaaacggucucauccacguuccuaaagaccuaucccagaaaacaacaaucuuaaauauaucgcaaaauuauauaucugagcuuuggacuucugacaucuuaucacugucaaaacugaggauuuugauaauuucucauaauagaauccaguaucuugauaucaguguuuucaaauucaaccaggaauuggaauacuuggauuugucccacaacaaguuggugaagauuucuugccacccuacugugaaccucaagcacuuggaccugucauuuaaugcauuugaugcccugccuauaugcaaagaguuuggcaauaugucucaacuaaaauuucugggguugagcaccacacacuuagaaaaaucuagugugcugccaauugcucauuugaauaucagcaaggucuugcuggucuuaggagagacuuauggggaaaaagaagacccugagggccuucaagacuuuaacacugagagucugcacauuguguuccccacaaacaaagaauuccauuuuauuuuggaugugucagucaagacuguagcaaaucuggaacuaucuaauaucaaaugugugcuagaagauaacaaauguucuuacuuccuaaguauucuggcgaaacuucaaacaaauccaaaguuaucaagucuuaccuuaaacaacauugaaacaacuuggaauucuuucauuaggauccuccagcugguuuggcauacaacuguaugguauuucucaauuucaaacgugaagcuacagggucagcuggacuucagagauuuugauuauucuggcacuuccuugaaggccuugucuauacaccaaguugucagcgauguguucgguuuuccgcaaaguuauaucuaugaaaucuuuucgaauaugaacaucaaaaauuucacagugucugguacacgcaugguccacaugcuuugcccauccaaaauuagcccguuccugcauuuggauuuuuccaauaaucucuuaacagacacgguuuuugaaaauugugggcaccuuacugaguuggagacacuuauuuuacaaaugaaucaauuaaaagaacuuucaaaaauagcugaaaugacuacacagaugaagucucugcaacaauuggauauuagccagaauucuguaagcuaugaugaaaagaaaggagacuguucuuggacuaaaaguuuauuaaguuuaaauaugucuucaaauauacuuacugacacuauuuucagauguauaccucccaggaucaagguacuugaucuucacagcaauaaaauaaagagcauuccuaaacaagucguaaaacuggaagcuuugcaagaacucaauguugcuuucaauucuuuaacugaccuuccuggauguggcagcuuuagcagccuuucuguauugaucauugaucacaauucaguuucccacccaucagcugauuucuuccagagcugccagaagaugaggucaauaaaagcaggggacaauccauuccaauguaccugugagcuaggagaauuugucaaaaauauagaccaaguaucaagugaaguguuagagggcuggccugauucuuauaagugugacuacccggaaaguuauagaggaacccuacuaaaggacuuucacaugucugaauuauccugcaacauaacucugcugaucgucaccaucguugccaccaugcugguguuggcugugacugugaccucccucugcaucuacuuggaucugcccugguaucucaggauggugugccaguggacccagacccggcgcagggccaggaacauacccuuagaagaacuccaaagaaaucuccaguuucaugcauuuauuucauauagugggcacgauucuuucugggugaagaaugaauuauugccaaaccuagagaaagaagguaugcagauuugccuucaugagagaaacuuuguuccuggcaagagcauuguggaaaauaucaucaccugcauugagaagaguuacaaguccaucuuuguuuugucucccaacuuuguccagagugaauggugccauuaugaacucuacuuugcccaucacaaucucuuucaugaaggaucuaauagcuuaauccugaucuugcuggaacccauuccgcaguacuccauuccuagcaguuaucacaagcucaaaagucucauggccaggaggacuuauuuggaauggcccaaggaaaagagcaaacguggccuuuuuugggcuaacuuaagggcagccauuaauauuaagcugacagagcaagcaaagaaauag

SEQ ID NO: 9531 - RNA, 2361 nt, Artificial Sequence
  derived and/or modified sequence opt1 from TLR1__Homo_sapiens__AAY85637
augaccagcaucuuccacuucgccaucaucuucaugcugauccuccagauccgcauccagcuguccgaggagagcgaguuccugguggaccgguccaagaacgggcucauccacguccccaaggaccugagccagaagaccacgauccugaacaucucccagaacuacaucagcgagcucuggaccuccgacauccugagccuguccaagcuccgcauccugaucaucagccacaaccggauccaguaccuggacaucuccguguucaaguucaaccaggagcucgaguaccuggaccugagccacaacaagcucgugaagaucuccugccacccgaccgucaaccugaagcaccuggaccucagcuucaacgccuucgacgcgcugcccaucugcaaggaguucgggaacaugucccagcugaaguuccucggccugagcaccacgcaccuggagaaguccagcgugcuccccaucgcccaccugaacaucuccaaggugcugcucguccugggggagaccuacggcgagaaggaggaccccgaggggcugcaggacuucaacaccgagagccuccacaucguguucccgaccaacaaggaguuccacuucauccuggacgugagcgucaagacgguggccaaccuggagcucuccaacaucaagugcgugcuggaggacaacaagugcagcuacuuccuguccauccucgccaagcugcagaccaaccccaagcugagcucccucacccugaacaacaucgagaccacguggaacagcuucauccgcauccugcagcucgucuggcacaccaccgugugguacuucuccaucagcaacgugaagcugcagggccagcuggacuuccgggacuucgacuacuccggcaccagccucaaggcccuguccauccaccaggucgugagcgacguguucggguucccccaguccuacaucuacgagaucuucagcaacaugaacaucaagaacuucacggucuccggcacccgcauggugcacaugcugugccccagcaagaucuccccguuccuccaccuggacuucagcaacaaccugcugaccgacaccguguucgagaacugcgggcaccucacggagcuggagacccugauccuccagaugaaccagcugaaggagcuguccaagaucgcggagaugaccacccagaugaagucccuccagcagcuggacaucagccagaacagcgucagcuacgacgagaagaagggcgacugcuccuggaccaagagccugcucucccugaacaugagcuccaacauccugaccgacaccaucuuccggugcaucccgccccgcaucaaggugcucgaccugcacagcaacaagaucaaguccauccccaagcaggucgugaagcuggaggcccuccaggagcugaacguggccuucaacagccugaccgaccuccccgggugcggcuccuucagcucccugagcguccugaucaucgaccacaacuccgugagccaccccuccgccgacuucuuccagagcugccagaagaugcggagcaucaaggcgggcgacaaccccuuccagugcacgugcgagcucggggaguucgugaagaacaucgaccaggucuccagcgaggugcuggagggcuggcccgacuccuacaagugcgacuacccggagagcuaccgcgggacccugcucaaggacuuccacauguccgagcugagcugcaacaucacccugcucaucgugaccaucgucgccacgaugcuggugcuggccgugaccgucaccucccucugcaucuaccuggaccugcccugguaccuccggauggugugccaguggacccagacgcgccggcgcgcccggaacaucccccuggaggagcugcagcgcaaccuccaguuccacgccuucaucagcuacuccggccacgacagcuucugggugaagaacgagcugcugcccaaccucgagaaggagggcaugcagaucugccugcacgagcggaacuucgucccggggaaguccaucguggagaacaucaucacgugcaucgagaaguccuacaagagcaucuucgugcugagccccaacuucguccaguccgaguggugccacuacgagcucuacuucgcgcaccacaaccuguuccacgagggcagcaacucccugauccucauccugcuggagcccaucccccaguacagcaucccguccagcuaccacaagcucaagagccugauggcccgccggaccuaccuggaguggcccaaggagaaguccaagcgcggccucuucugggccaaccugcgggccgccaucaacaucaagcugaccgagcaggcgaagaaguga

SEQ ID NO: 9532 - RNA, 2361 nt, Artificial Sequence
  derived and/or modified sequence opt2 from TLR1__Homo_sapiens__AAY85637
augaccuccaucuuccacuucgccaucaucuucaugcucauccuccagauccgcauccagcucuccgaggaguccgaguuccucgucgaccgcuccaagaacggccucauccacguccccaaggaccucucccagaagaccaccauccucaacaucucccagaacuacaucuccgagcucuggaccuccgacauccucucccucuccaagcuccgcauccucaucaucucccacaaccgcauccaguaccucgacaucuccgucuucaaguucaaccaggagcucgaguaccucgaccucucccacaacaagcucgucaagaucuccugccaccccaccgucaaccucaagcaccucgaccucuccuucaacgccuucgacgcccuccccaucugcaaggaguucggcaacaugucccagcucaaguuccucggccucuccaccacccaccucgagaaguccuccguccuccccaucgcccaccucaacaucuccaagguccuccucguccucggcgagaccuacggcgagaaggaggaccccgagggccuccaggacuucaacaccgagucccuccacaucgucuuccccaccaacaaggaguuccacuucauccucgacgucuccgucaagaccgucgccaaccucgagcucuccaacaucaagugcguccucgaggacaacaagugcuccuacuuccucuccauccucgccaagcuccagaccaaccccaagcucuccucccucacccucaacaacaucgagaccaccuggaacuccuucauccgcauccuccagcucgucuggcacaccaccgucugguacuucuccaucuccaacgucaagcuccagggccagcucgacuuccgcgacuucgacuacuccggcaccucccucaaggcccucuccauccaccaggucgucuccgacgucuucggcuucccccaguccuacaucuacgagaucuucuccaacaugaacaucaagaacuucaccgucuccggcacccgcaugguccacaugcucugccccuccaagaucucccccuuccuccaccucgacuucuccaacaaccuccucaccgacaccgucuucgagaacugcggccaccucaccgagcucgagacccucauccuccagaugaaccagcucaaggagcucuccaagaucgccgagaugaccacccagaugaagucccuccagcagcucgacaucucccagaacuccgucuccuacgacgagaagaagggcgacugcuccuggaccaagucccuccucucccucaacauguccuccaacauccucaccgacaccaucuuccgcugcauccccccccgcaucaagguccucgaccuccacuccaacaagaucaaguccauccccaagcaggucgucaagcucgaggcccuccaggagcucaacgucgccuucaacucccucaccgaccuccccggcugcggcuccuucuccucccucuccguccucaucaucgaccacaacuccgucucccaccccuccgccgacuucuuccaguccugccagaagaugcgcuccaucaaggccggcgacaaccccuuccagugcaccugcgagcucggcgaguucgucaagaacaucgaccaggucuccuccgagguccucgagggcuggcccgacuccuacaagugcgacuaccccgaguccuaccgcggcacccuccucaaggacuuccacauguccgagcucuccugcaacaucacccuccucaucgucaccaucgucgccaccaugcucguccucgccgucaccgucaccucccucugcaucuaccucgaccuccccugguaccuccgcauggucugccaguggacccagacccgccgccgcgcccgcaacaucccccucgaggagcuccagcgcaaccuccaguuccacgccuucaucuccuacuccggccacgacuccuucugggucaagaacgagcuccuccccaaccucgagaaggagggcaugcagaucugccuccacgagcgcaacuucguccccggcaaguccaucgucgagaacaucaucaccugcaucgagaaguccuacaaguccaucuucguccucucccccaacuucguccaguccgaguggugccacuacgagcucuacuucgcccaccacaaccucuuccacgagggcuccaacucccucauccucauccuccucgagcccaucccccaguacuccauccccuccuccuaccacaagcucaagucccucauggcccgccgcaccuaccucgaguggcccaaggagaaguccaagcgcggccucuucugggccaaccuccgcgccgccaucaacaucaagcucaccgagcaggccaagaaguga

SEQ ID NO: 9533 - RNA, 2361 nt, Artificial Sequence
  derived and/or modified sequence opt3 from TLR1__Homo_sapiens__AAY85637
augaccagcaucuuccacuuugccauuauauucaugcugauccuccagauuagaauccaacuuuccgaggaaucugaguuucugguggacaggucaaagaacggcuugauucauguccccaaagauuuaagucagaagacaacuauccugaauauaagccagaacuacaucuccgaacuauggacgucugacauucucucgcugucaaaacuucggauccugauuaucagccacaaucgcauacaguauuuggauauuaguguuuucaaguuuaaccaagagcucgaauaccuggaccugucccauaauaaacucgugaagaucucuugccacccuaccguaaacuuaaagcaucuggaucuuagcuucaaugcuuuugacgcauugccaauuuguaaagaguucgggaacaugucccagcugaaguuucuaggacucucaacaacucaccuggagaaaaguagcgugcuuccgaucgcccaccugaauaucucuaaggucuugcucgugcugggugaaaccuauggcgagaaagaagaucccgagggguuacaggacuucaacacagagucccugcauauuguuuuuccuaccaauaaggaguuccacuuuauacucgaugugucagucaagacuguggcgaaccuugaacugagcaauaucaaaugcguauuggaagacaacaaguguaguuacuuccuaucuauucuggcuaaacuccagacaaauccaaagcuguccagccuuacccugaacaacaucgagacgacuuggaacucguucauacgaauuuugcaacucguuuggcauaccacagugugguauuuuucuaucuccaaugucaaacugcagggacaguuagauuuccgugacuuugauuacucaggcacaagucugaaggcccuaagcauccaccaggugguguccgacgucuucgguuuuccccaaucuuauauuuacgaaaucuucagcaauaugaacauuaaaaauuuuaccguuucagggacaagaauggugcacaugcucugcccuaguaagauauccccauuccugcaucuugacuuuagcaacaauuugcugaccgauacgguauucgagaacuguggacaccucacugagcuggaaacacuuauccugcagaugaaucaguugaaggagcucucuaaaauugcagaaaugaccacucaaaugaagucacugcagcaguuagacaucagucagaacagcguguccuacgaugagaaaaagggcgacugcucuuggacaaaaucgcugcuaagccucaauauguccucaaacauccugaccgauacgauuuuuagguguauacccccucggaucaagguccuugacuugcauaguaauaagauuaaaucuaucccaaagcaagugguuaaacuggaagcccuccaggagcugaacguggcuuucaauagcuuaaccgaucugccgggcugcggguccuuuucaagccuuucugucuugauuaucgaccacaacuccgugagucaucccagcgcagauuucuuccagucuugucagaagaugcgcuccauaaaagccggagacaacccuuuucaaugcacaugugagcucggugaguucguaaagaauaucgaucagguuucaagugaagugcuggaaggcuggccagacagcuauaagugcgacuaccccgagucguauagagggacucuacugaaagauuuucacauguccgaacucucuugcaacauuacccugcuuaucgucacaauuguggcuacuauguugguccuggccgugaccguuacuagcuuauguaucuaccucgaccugccuugguaucuuaggauggugugccaguggacccagacucggcgccgagcgagaaauauaccacuggaggaguugcaaaggaaccuccaguuccacgcauuuauuucauacaguggacaugauuccuucuggguaaagaaugaacugcuacccaaccuggagaaagaaggcaugcagaucugucuccacgagcggaauuuugucccggguaagucuauuguggagaacaucauaacgugcaucgaaaagagcuauaaguccauuuucguucugucaccuaauuuugugcagagcgaguggugucauuacgaacuuuacuucgcccaccacaacuuguuucaugaggggaguaauucucugaucuuaauucuccuggaacccaucccacaauauuccauaccuagcucguaccacaaacuuaaaucacugauggcucgucgcacauaucuagaguggcccaaggagaaaucuaagagaggacucuucugggccaaccugagggcagcuauuaauaucaaauugaccgaacaggccaagaaauga

SEQ ID NO: 9534 - RNA, 2361 nt, Artificial Sequence
  derived and/or modified sequence opt4 from TLR1__Homo_sapiens__AAY85637
augaccagcaucuuccacuucgccaucaucuucaugcugauccugcagaucagaauccagcugagcgaggagagcgaguuccugguggacagaagcaagaacggccugauccacgugcccaaggaccugagccagaagaccaccauccugaacaucagccagaacuacaucagcgagcuguggaccagcgacauccugagccugagcaagcugagaauccugaucaucagccacaacagaauccaguaccuggacaucagcguguucaaguucaaccaggagcuggaguaccuggaccugagccacaacaagcuggugaagaucagcugccaccccaccgugaaccugaagcaccuggaccugagcuucaacgccuucgacgcccugcccaucugcaaggaguucggcaacaugagccagcugaaguuccugggccugagcaccacccaccuggagaagagcagcgugcugcccaucgcccaccugaacaucagcaaggugcugcuggugcugggcgagaccuacggcgagaaggaggaccccgagggccugcaggacuucaacaccgagagccugcacaucguguuccccaccaacaaggaguuccacuucauccuggacgugagcgugaagaccguggccaaccuggagcugagcaacaucaagugcgugcuggaggacaacaagugcagcuacuuccugagcauccuggccaagcugcagaccaaccccaagcugagcagccugacccugaacaacaucgagaccaccuggaacagcuucaucagaauccugcagcugguguggcacaccaccgugugguacuucagcaucagcaacgugaagcugcagggccagcuggacuucagagacuucgacuacagcggcaccagccugaaggcccugagcauccaccagguggugagcgacguguucggcuucccccagagcuacaucuacgagaucuucagcaacaugaacaucaagaacuucaccgugagcggcaccagaauggugcacaugcugugccccagcaagaucagccccuuccugcaccuggacuucagcaacaaccugcugaccgacaccguguucgagaacugcggccaccugaccgagcuggagacccugauccugcagaugaaccagcugaaggagcugagcaagaucgccgagaugaccacccagaugaagagccugcagcagcuggacaucagccagaacagcgugagcuacgacgagaagaagggcgacugcagcuggaccaagagccugcugagccugaacaugagcagcaacauccugaccgacaccaucuucagaugcaucccccccagaaucaaggugcuggaccugcacagcaacaagaucaagagcauccccaagcagguggugaagcuggaggcccugcaggagcugaacguggccuucaacagccugaccgaccugcccggcugcggcagcuucagcagccugagcgugcugaucaucgaccacaacagcgugagccaccccagcgccgacuucuuccagagcugccagaagaugagaagcaucaaggccggcgacaaccccuuccagugcaccugcgagcugggcgaguucgugaagaacaucgaccaggugagcagcgaggugcuggagggcuggcccgacagcuacaagugcgacuaccccgagagcuacagaggcacccugcugaaggacuuccacaugagcgagcugagcugcaacaucacccugcugaucgugaccaucguggccaccaugcuggugcuggccgugaccgugaccagccugugcaucuaccuggaccugcccugguaccugagaauggugugccaguggacccagaccagaagaagagccagaaacaucccccuggaggagcugcagagaaaccugcaguuccacgccuucaucagcuacagcggccacgacagcuucugggugaagaacgagcugcugcccaaccuggagaaggagggcaugcagaucugccugcacgagagaaacuucgugcccggcaagagcaucguggagaacaucaucaccugcaucgagaagagcuacaagagcaucuucgugcugagccccaacuucgugcagagcgaguggugccacuacgagcuguacuucgcccaccacaaccuguuccacgagggcagcaacagccugauccugauccugcuggagcccaucccccaguacagcauccccagcagcuaccacaagcugaagagccugauggccagaagaaccuaccuggaguggcccaaggagaagagcaagagaggccuguucugggccaaccugagagccgccaucaacaucaagcugaccgagcaggccaagaaguga

SEQ ID NO: 9535 - RNA, 2361 nt, Artificial Sequence
  derived and/or modified sequence opt5 from TLR1__Homo_sapiens__AAY85637
augaccagcaucuuccacuuugccauuaucuucaugcugauucuccagaucagaauccaacuguccgaggaaucugaguuucuuguggaccggagcaagaacggccugauccauguccccaaagaucucucccagaagacaacgauccugaauauuucucagaacuacaucagcgaacuuuggaccuccgacauucugucucucagcaaacugcgcauccugauuaucucccacaauagaauccaguaucucgauaucagcguuuucaaguuuaaccaagagcuggaauaccuugaccugucucauaauaaacucgugaagaucuccugccacccuacagugaaccugaagcaucuugaucugagcuucaaugcuuuugacgcccucccgauuuguaaagaguucgggaacaugucucagcugaaguuucugggacucuccaccacacaccuggagaaaagcucuguccuucccaucgcgcaccugaauauuuccaaggugcuccugguucuuggcgaaaccuauggggagaaagaagauccugagggacugcaggacuucaacacagagagccuccauaucguguuucccaccaauaaggaguuccacuuuauucuggaugucuccgugaagacgguugcuaaccuggaacucucuaauaucaaaugcgugcuggaagacaacaaguguagcuacuuccuuuccauccuggccaaacuccagaccaauccuaagcugagcucucuuacacugaacaacauugagaccacauggaacuccuucauccggauucuccaacuggucuggcauaccacggugugguauuuuagcaucucuaaugugaaacugcagggccagcucgauuuccgcgacuuugauuacagcgggacaucccugaaggcccuuucuauucaccaggucguuagcgacguguucggauuuccccaauccuauaucuacgaaaucuucagcaauaugaacauuaaaaauuuuaccgugucuggcacaagaaugguccacaugcugugcccuuccaagaucagcccguuccuccaucuggacuuuucuaacaaucugcuuaccgauaccguguucgagaacuguggccaccucacagagcuggaaacgcugauucuccagaugaaucagcugaaggagcuuuccaaaaucgcugaaaugaccacacaaaugaaaagccugcagcagcucgacauuucccagaacucuguuagcuacgaugagaaaaagggggacugcuccuggaccaaaucucugcugagccuuaauauguccagcaacauccucacagauaccauuuuucgguguauucccccucgcaucaaggugcuggaccugcauucuaauaagauuaaauccauccccaagcaagucgugaaacucgaagcccugcaggagcuuaacguugcuuucaauagccugacggaucucccuggaugcggcucuuuuuccagccugucugugcugauuaucgaccacaacagcgucucccaucccagcgccgauuucuuccagucuugucagaagaugagauccauuaaagcgggggacaacccguuucaaugcacaugugagcuuggagaguucgugaagaauaucgaucaggucagcuccgaagugcucgaaggcuggccugacucuuauaagugcgacuaccccgagagcuaucgggggacccugcugaaagauuuucacauguccgaacucucuugcaacaucacccugcuuauuguuacaaucguggccaccaugcugguccucgcugugacaguuacgagccuguguauuuaccuggaccuuccuugguaucuccgcauggugugccaguggacccagacaagacggcgcgccagaaauaucccccuggaggagcugcaacggaaccuccaguuccacgcuuuuauuuccuacucuggacaugauagcuucugggucaagaaugaacugcuucccaaccuggagaaagaaggcaugcagaucugucuccacgagcgcaauuuugugccuggcaaguccaucguggagaacauuauuaccugcauugaaaagagcuauaagucuaucuucguucuguccccgaauuuuguccagagcgaguggugucauuacgaacuguacuucgcccaccacaaccuuuuucaugaggggucuaauucccugauucucauccugcucgaacccaucccucaauauagcauucccucuuccuaccacaagcugaaaagccuuauggcgagacggacauaucuggaguggccuaaggagaaauccaagagaggacucuucugggccaaccugcgcgcugccaucaauauuaaacugaccgaacaggcuaagaaauga

SEQ ID NO: 9536 - protein, 786 aa, Artificial Sequence [sequence omitted]

SEQ ID NO: 9537 - RNA, 2361 nt, Artificial Sequence
  TLR1__Homo_sapiens__AAY85641
augacuagcaucuuccauuuugccauuaucuucauguuaauacuucagaucagaauacaauuaucugaagaaagugaauuuuuaguugauaggucaaaaaacggucucauccacguuccuaaagaccuaucccagaaaacaacaaucuuaaauauaucgcaaaauuauauaucugagcuuuggacuucugacaucuuaucacugucaaaacugaggauuuugauaauuucucauaauagaauccaguaucuugauaucaguguuuucaaauucaaccaggaauuggaauacuuggauuugucccacaacaaguuggugaagauuucuugccacccuacugugaaccucaaguacuuggaccugucauuuaaugcauuugaugcccugccuauaugcaaagaguuuggcaauaugucucaacuaaaauuucugggguugagcaccacacacuuagaaaaaucuagugugcugccaauugcucauuugaauaucagcaaggucuugcuggucuuaggagagacuuauggggaaaaagaagacccugagggccuucaagacuuuaacacugagagucugcacauuguguuccccacaaacaaagaauuccauuuuauuuuggaugugucagucaagacuguagcaaaucuggaacuaucuaauaucaaaugugugcuagaagauaacaaauguucuuacuuccuaaguauucuggcgaaacuucaaacaaauccaaaguuaucaagucuuaccuuaaacaacauugaaacaacuuggaauucuuucauuaggauccuccagcugguuuggcauacaacuguaugguauuucucaauuucaaacgugaagcuacagggucagcuggacuucagagauuuugauuauucuggcacuuccuugaaggccuugucuauacaccaaguugucagcgauguguucgguuuuccgcaaaguuauaucuaugaaaucuuuucgaauaugaacaucaaaaauuucacagugucugguacacgcaugguccacaugcuuugcccauccaaaauuagcccguuccugcauuuggauuuuuccaauaaucucuuaacagacacgguuuuugaaaauugugggcaccuuacugaguuggagacacuuauuuuacaaaugaaucaauuaaaagaacuuucaaaaauagcugaaaugacuacacagaugaagucucugcaacaauuggauauuagccagaauucuguaagcuaugaugaaaagaaaggagacuguucuuggacuaaaaguuuauuaaguuuaaauaugucuucaaauauacuuacugacacuauuuucagauguuuaccucccaggaucaagguacuugaucuucacagcaauaaaauaaagagcauuccuaaacaagucguaaaacuggaagcuuugcaagaacucaauguugcuuucaauucuuuaacugaccuuccuggauguggcagcuuuagcagccuuucuguauugaucauugaucacaauucaguuucccacccaucagcugauuucuuccagagcugccagaagaugaggucaauaaaagcaggggacaauccauuccaauguaccugugagcuaggagaauuugucaaaaauauagaccaaguaucaagugaaguguuagagggcuggccugauucuuauaagugugacuacccggaaaguuauagaggaacccuacuaaaggacuuucacaugucugaauuauccugcaacauaacucugcugaucgucaccaucguugccaccaugcugguguuggcugugacugugaccucccucugcaucuacuuggaucugcccugguaucucaggauggugugccaguggacccagacccggcgcagggccaggaacauacccuuagaagaacuccaaagaaaucuccaguuucaugcauuuauuucauauagugggcacgauucuuucugggugaagaaugaauuauugccaaaccuagagaaagaagguaugcagauuugccuucaugagagaaacuuuguuccuggcaagagcauuguggaaaauaucaucaccugcauugagaagaguuacaaguccaucuuuguuuugucucccaacuuuguccagagugaauggugccauuaugaacucuacuuugcccaucacaaucucuuucaugaaggaucuaauagcuuaauccugaucuugcuggaacccauuccgcaguacuccauuccuagcaguuaucacaagcucaaaagucucauggccaggaggacuuauuuggaauggcccaaggaaaagagcaaacguggccuuuuuugggcuaacuuaagggcagccauuaauauuaagcugacagagcaagcaaagaaauag

SEQ ID NO: 9538 - RNA, 2361 nt, Artificial Sequence
  derived and/or modified sequence opt1 from TLR1__Homo_sapiens__AAY85641
augaccagcaucuuccacuucgccaucaucuucaugcugauccuccagauccgcauccagcuguccgaggagagcgaguuccugguggaccgguccaagaacggccucauccacguccccaaggaccugagccagaagaccacgauccugaacaucucccagaacuacaucagcgagcucuggaccuccgacauccugagccuguccaagcuccgcauccugaucaucagccacaaccggauccaguaccuggacaucuccguguucaaguucaaccaggagcucgaguaccuggaccugagccacaacaagcucgugaagaucuccugccacccgaccgucaaccugaaguaccuggaccucagcuucaacgccuucgacgcgcugcccaucugcaaggaguucgggaacaugucccagcugaaguuccucggccugagcaccacgcaccuggagaaguccagcgugcuccccaucgcccaccugaacaucuccaaggugcugcucguccugggggagaccuacggcgagaaggaggaccccgaggggcugcaggacuucaacaccgagagccuccacaucguguucccgaccaacaaggaguuccacuucauccuggacgugagcgucaagacgguggccaaccuggagcucuccaacaucaagugcgugcuggaggacaacaagugcagcuacuuccuguccauccucgccaagcugcagaccaaccccaagcugagcucccucacccugaacaacaucgagaccacguggaacagcuucauccgcauccugcagcucgucuggcacaccaccgugugguacuucuccaucagcaacgugaagcugcagggccagcuggacuuccgggacuucgacuacuccggcaccagccucaaggcccuguccauccaccaggucgugagcgacguguucggguucccccaguccuacaucuacgagaucuucagcaacaugaacaucaagaacuucacggucuccggcacccgcauggugcacaugcugugccccagcaagaucuccccguuccuccaccuggacuucagcaacaaccugcugaccgacaccguguucgagaacugcgggcaccucacggagcuggagacccugauccuccagaugaaccagcugaaggagcuguccaagaucgcggagaugaccacccagaugaagucccuccagcagcuggacaucagccagaacagcgucagcuacgacgagaagaagggcgacugcuccuggaccaagagccugcucucccugaacaugagcuccaacauccugaccgacaccaucuuccggugccucccgccccgcaucaaggugcuggaccugcacagcaacaagaucaaguccauccccaagcaggucgugaagcucgaggcccugcaggagcugaacguggccuucaacagccucaccgaccugcccgggugcggcuccuucagcucccugagcguccucaucaucgaccacaacuccgugagccaccccuccgccgacuucuuccagagcugccagaagaugcggagcaucaaggcgggcgacaaccccuuccagugcacgugcgagcugggggaguucgugaagaacaucgaccaggucuccagcgaggugcuggagggcuggcccgacuccuacaagugcgacuacccggagagcuaccgcgggacccuccugaaggacuuccacauguccgagcugagcugcaacaucacccuccugaucgugaccaucgucgccacgaugcuggugcucgccgugaccgucaccucccugugcaucuaccuggaccuccccugguaccugcggauggugugccaguggacccagacgcgccggcgcgcccggaacaucccccuggaggagcuccagcgcaaccugcaguuccacgccuucaucagcuacuccggccacgacagcuucugggugaagaacgagcugcuccccaaccuggagaaggagggcaugcagaucugccugcacgagcggaacuucgucccggggaaguccaucguggagaacaucaucacgugcaucgagaaguccuacaagagcaucuucgugcucagccccaacuucguccaguccgaguggugccacuacgagcuguacuucgcgcaccacaaccuguuccacgagggcagcaacucccucauccugauccugcucgagcccaucccccaguacagcaucccguccagcuaccacaagcucaagagccugauggcccgccggaccuaccuggaguggcccaaggagaaguccaagcgcgggcuguucugggccaaccugcgggccgccaucaacaucaagcucaccgagcaggcgaagaaguga

SEQ ID NO: 9539 - RNA, 2361 nt, Artificial Sequence
  derived and/or modified sequence opt2 from TLR1__Homo_sapiens__AAY85641
augaccuccaucuuccacuucgccaucaucuucaugcucauccuccagauccgcauccagcucuccgaggaguccgaguuccucgucgaccgcuccaagaacggccucauccacguccccaaggaccucucccagaagaccaccauccucaacaucucccagaacuacaucuccgagcucuggaccuccgacauccucucccucuccaagcuccgcauccucaucaucucccacaaccgcauccaguaccucgacaucuccgucuucaaguucaaccaggagcucgaguaccucgaccucucccacaacaagcucgucaagaucuccugccaccccaccgucaaccucaaguaccucgaccucuccuucaacgccuucgacgcccuccccaucugcaaggaguucggcaacaugucccagcucaaguuccucggccucuccaccacccaccucgagaaguccuccguccuccccaucgcccaccucaacaucuccaagguccuccucguccucggcgagaccuacggcgagaaggaggaccccgagggccuccaggacuucaacaccgagucccuccacaucgucuuccccaccaacaaggaguuccacuucauccucgacgucuccgucaagaccgucgccaaccucgagcucuccaacaucaagugcguccucgaggacaacaagugcuccuacuuccucuccauccucgccaagcuccagaccaaccccaagcucuccucccucacccucaacaacaucgagaccaccuggaacuccuucauccgcauccuccagcucgucuggcacaccaccgucugguacuucuccaucuccaacgucaagcuccagggccagcucgacuuccgcgacuucgacuacuccggcaccucccucaaggcccucuccauccaccaggucgucuccgacgucuucggcuucccccaguccuacaucuacgagaucuucuccaacaugaacaucaagaacuucaccgucuccggcacccgcaugguccacaugcucugccccuccaagaucucccccuuccuccaccucgacuucuccaacaaccuccucaccgacaccgucuucgagaacugcggccaccucaccgagcucgagacccucauccuccagaugaaccagcucaaggagcucuccaagaucgccgagaugaccacccagaugaagucccuccagcagcucgacaucucccagaacuccgucuccuacgacgagaagaagggcgacugcuccuggaccaagucccuccucucccucaacauguccuccaacauccucaccgacaccaucuuccgcugccuccccccccgcaucaagguccucgaccuccacuccaacaagaucaaguccauccccaagcaggucgucaagcucgaggcccuccaggagcucaacgucgccuucaacucccucaccgaccuccccggcugcggcuccuucuccucccucuccguccucaucaucgaccacaacuccgucucccaccccuccgccgacuucuuccaguccugccagaagaugcgcuccaucaaggccggcgacaaccccuuccagugcaccugcgagcucggcgaguucgucaagaacaucgaccaggucuccuccgagguccucgagggcuggcccgacuccuacaagugcgacuaccccgaguccuaccgcggcacccuccucaaggacuuccacauguccgagcucuccugcaacaucacccuccucaucgucaccaucgucgccaccaugcucguccucgccgucaccgucaccucccucugcaucuaccucgaccuccccugguaccuccgcauggucugccaguggacccagacccgccgccgcgcccgcaacaucccccucgaggagcuccagcgcaaccuccaguuccacgccuucaucuccuacuccggccacgacuccuucugggucaagaacgagcuccuccccaaccucgagaaggagggcaugcagaucugccuccacgagcgcaacuucguccccggcaaguccaucgucgagaacaucaucaccugcaucgagaaguccuacaaguccaucuucguccucucccccaacuucguccaguccgaguggugccacuacgagcucuacuucgcccaccacaaccucuuccacgagggcuccaacucccucauccucauccuccucgagcccaucccccaguacuccauccccuccuccuaccacaagcucaagucccucauggcccgccgcaccuaccucgaguggcccaaggagaaguccaagcgcggccucuucugggccaaccuccgcgccgccaucaacaucaagcucaccgagcaggccaagaaguga

SEQ ID NO: 9540 - RNA, 2361 nt, Artificial Sequence
  derived and/or modified sequence opt3 from TLR1__Homo_sapiens__AAY85641
augaccagcaucuuccacuuugccauuauauucaugcugauccuccagauuagaauccaacuuuccgaggaaucugaguuucugguggacaggucaaagaacggcuugauucauguccccaaagauuuaagucagaagacaacuauccugaauauaagccagaacuacaucuccgaacuauggacgucugacauucucucgcugucaaaacuucggauccugauuaucagccacaaucgcauacaguauuuggauauuaguguuuucaaguuuaaccaagagcucgaauaccuggaccugucccauaauaaacucgugaagaucucuugccacccuaccguaaacuuaaaguaucuggaucuuagcuucaaugcuuuugacgcauugccaauuuguaaagaguucgggaacaugucccagcugaaguuucuaggacucucaacaacucaucuggagaaaaguagcgugcuuccgaucgcccaccugaauaucucuaaggucuugcucgugcugggugaaaccuacggcgagaaagaagaucccgagggguuacaggacuucaacacagagucccugcacauuguuuuuccuaccaauaaggaguuccauuuuauacucgaugugucagucaagacuguggcgaaccuugaacugagcaauaucaaaugcguauuggaagacaacaaguguaguuauuuccuaucuauucuggcuaaacuccagacaaauccaaagcuguccagccuuacccugaacaacaucgagacgacuuggaauagcuucauacgaauuuugcaacucguuuggcacaccacagugugguacuuuucuaucuccaacgucaaacugcagggacaguuagauuuccgugacuuugauuauucaggcacuucacugaaggcccuaagcauccaucaggugguguccgacgucuucgguuuuccccaaucuuacauuuacgaaaucuucagcaauaugaacauuaaaaauuuuaccguuucagggacaagaauggugcacaugcucugcccuaguaagauauccccauuccugcaccuugacuuuagcaacaauuugcugaccgauacgguauucgagaacuguggacaucucacugagcuggaaacacuuauccugcagaugaaucaguugaaggagcucucuaaaauugcagaaaugaccacucaaaugaagucacugcagcaguuagacaucagucagaacagcguguccuaugaugagaaaaagggcgacugcucuuggacaaaaucgcugcuaagccucaauauguccucaaacauccugaccgauacgauuuuuaggugucuucccccucggauaaaggucuuggaccugcacaguaauaagaucaaaucuauuccaaagcaagugguuaaacucgaagcccugcaggaguuaaacguggcuuucaauagccugaccgaucuuccgggcugcggguccuuuaguagcuugucuguccucaucauugaccauaacuccgugagucaccccagcgcagauuucuuccagucuugucagaagaugcgcuccaucaaagccggagacaacccuuuucaaugcacaugugagcugggugaguucguaaagaauauagaucagguuucaagugaagugcuagaaggcuggccagacagcuacaagugcgacuaucccgagucguacagagggacucugcucaaagauuuucauauguccgaacugucuugcaacaucacccuuuugauugucacaaucguggcuacuaugcuggucuuagccgugaccguuacaagccucuguauuuaucuggaccuuccuugguaccugaggauggugugccaguggacccagacucggcgccgagcgagaaauaucccauuggaggagcuccaaaggaaccugcaguuccacgcauuuauaucauauaguggacacgauuccuucuggguaaagaaugaacuacugcccaaccucgagaaagaaggcaugcagauuugucugcaugagcggaauuuugucccggguaagucuaucguggagaacauuaucacgugcauagaaaaaucguacaaguccaucuucguucuuucaccuaauuuugugcagagcgaguggugucacuacgaauuguauuucgcccaucacaaccuguuucacgaggggaguaauucuuuaauucucauccugcuugaacccauuccacaauacuccaucccuagcucguaucauaagcugaaaucacuaauggcucgucgcacauaccucgaguggcccaaggagaaaucuaagagaggacuguucugggccaacuugagggcagcuauaaauauuaaacugaccgaacaggccaagaaauga

SEQ ID NO: 9541 - RNA, 2361 nt, Artificial Sequence
  derived and/or modified sequence opt4 from TLR1__Homo_sapiens__AAY85641
augaccagcaucuuccacuucgccaucaucuucaugcugauccugcagaucagaauccagcugagcgaggagagcgaguuccugguggacagaagcaagaacggccugauccacgugcccaaggaccugagccagaagaccaccauccugaacaucagccagaacuacaucagcgagcuguggaccagcgacauccugagccugagcaagcugagaauccugaucaucagccacaacagaauccaguaccuggacaucagcguguucaaguucaaccaggagcuggaguaccuggaccugagccacaacaagcuggugaagaucagcugccaccccaccgugaaccugaaguaccuggaccugagcuucaacgccuucgacgcccugcccaucugcaaggaguucggcaacaugagccagcugaaguuccugggccugagcaccacccaccuggagaagagcagcgugcugcccaucgcccaccugaacaucagcaaggugcugcuggugcugggcgagaccuacggcgagaaggaggaccccgagggccugcaggacuucaacaccgagagccugcacaucguguuccccaccaacaaggaguuccacuucauccuggacgugagcgugaagaccguggccaaccuggagcugagcaacaucaagugcgugcuggaggacaacaagugcagcuacuuccugagcauccuggccaagcugcagaccaaccccaagcugagcagccugacccugaacaacaucgagaccaccuggaacagcuucaucagaauccugcagcugguguggcacaccaccgugugguacuucagcaucagcaacgugaagcugcagggccagcuggacuucagagacuucgacuacagcggcaccagccugaaggcccugagcauccaccagguggugagcgacguguucggcuucccccagagcuacaucuacgagaucuucagcaacaugaacaucaagaacuucaccgugagcggcaccagaauggugcacaugcugugccccagcaagaucagccccuuccugcaccuggacuucagcaacaaccugcugaccgacaccguguucgagaacugcggccaccugaccgagcuggagacccugauccugcagaugaaccagcugaaggagcugagcaagaucgccgagaugaccacccagaugaagagccugcagcagcuggacaucagccagaacagcgugagcuacgacgagaagaagggcgacugcagcuggaccaagagccugcugagccugaacaugagcagcaacauccugaccgacaccaucuucagaugccugccccccagaaucaaggugcuggaccugcacagcaacaagaucaagagcauccccaagcagguggugaagcuggaggcccugcaggagcugaacguggccuucaacagccugaccgaccugcccggcugcggcagcuucagcagccugagcgugcugaucaucgaccacaacagcgugagccaccccagcgccgacuucuuccagagcugccagaagaugagaagcaucaaggccggcgacaaccccuuccagugcaccugcgagcugggcgaguucgugaagaacaucgaccaggugagcagcgaggugcuggagggcuggcccgacagcuacaagugcgacuaccccgagagcuacagaggcacccugcugaaggacuuccacaugagcgagcugagcugcaacaucacccugcugaucgugaccaucguggccaccaugcuggugcuggccgugaccgugaccagccugugcaucuaccuggaccugcccugguaccugagaauggugugccaguggacccagaccagaagaagagccagaaacaucccccuggaggagcugcagagaaaccugcaguuccacgccuucaucagcuacagcggccacgacagcuucugggugaagaacgagcugcugcccaaccuggagaaggagggcaugcagaucugccugcacgagagaaacuucgugcccggcaagagcaucguggagaacaucaucaccugcaucgagaagagcuacaagagcaucuucgugcugagccccaacuucgugcagagcgaguggugccacuacgagcuguacuucgcccaccacaaccuguuccacgagggcagcaacagccugauccugauccugcuggagcccaucccccaguacagcauccccagcagcuaccacaagcugaagagccugauggccagaagaaccuaccuggaguggcccaaggagaagagcaagagaggccuguucugggccaaccugagagccgccaucaacaucaagcugaccgagcaggccaagaaguga

SEQ ID NO: 9542 - RNA, 2361 nt, Artificial Sequence
  derived and/or modified sequence opt5 from TLR1__Homo_sapiens__AAY85641
augaccagcaucuuccacuuugccauuaucuucaugcugauucuccagauccggauucaacuguccgaggaaucugaguuucuuguggacagaagcaagaacggccugauccauguccccaaagaucucucccagaagacaacgauccugaauauuucucagaacuacaucagcgaacuuuggaccuccgacauucugucucucagcaaacugcgcauccugauuaucucccacaauagaauccaguaucucgauauuagcguuuucaaguuuaaccaagagcuggaauaccuugaccugucucauaauaaacucgugaagaucuccugccacccuacagugaaccugaaguaucuugaucugagcuucaaugcuuuugacgcccucccgauuuguaaagaguucgggaacaugucucagcugaaguuucugggacucuccaccacacaucuggagaaaagcucuguccuucccaucgcgcaccugaauauuuccaaggugcuccugguucuuggcgaaaccuacggggagaaagaagauccugagggacugcaggacuucaacacagagagccuccacaucguguuucccaccaauaaggaguuccauuuuauucuggaugucuccgugaagacgguugcuaaccuggaacucucuaauaucaaaugcgugcuggaagacaacaaguguagcuauuuccuuuccauccuggccaaacuccagaccaauccuaagcugagcucucuuacacugaacaacauugagaccacauggaauagcuucauccggauucuccaacuggucuggcacaccacggugugguacuuuagcaucucuaacgugaaacugcagggccagcucgauuuccgcgacuuugauuauagcgggacaucccugaaggcccuuucuauucaucaggucguuagcgacguguucggauuuccccaauccuacaucuacgaaaucuucagcaauaugaacauuaaaaauuuuaccgugucuggcacaagaaugguccacaugcugugcccuuccaagaucagcccguuccuccaccuggacuuuucuaacaaucugcuuaccgauaccguguucgagaacuguggccaucucacagagcuggaaacgcugauucuccagaugaaucagcugaaggagcuuuccaaaaucgcugaaaugaccacacaaaugaagucccugcagcagcucgacauuucccagaacucuguuagcuaugaugagaaaaagggggacugcuccuggaccaaaucucugcugagccuuaauauguccagcaacauccucacagauaccauuuuucggugucugcccccucgcaucaaggugcuggaccuccacucuaauaagaucaaauccauucccaagcaagucgugaaacuggaagcccuucaggagcugaacguugcuuucaauagccucacggaucugccuggaugcggcucuuuuuccagccugucugugcuuaucauugaccauaacagcgucucccaccccagcgccgauuucuuccagucuugucagaagaugagauccaucaaagcgggggacaacccguuucaaugcacaugugagcucggagaguucgugaagaauauugaucaggucagcuccgaagugcuggaaggcuggccugacucuuacaagugcgacuaucccgagagcuaccgggggacccugcucaaagauuuucauauguccgaacugucuugcaacaucacccuucugaucguuacaauuguggccaccaugcucguccuggcugugacaguuacgagccuguguaucuaucuugaccucccuugguaccugcgcauggugugccaguggacccagacaagacggcgcgccagaaauauuccccuggaggagcuccaacggaaccugcaguuccacgcuuuuaucuccuauucuggacacgauagcuucugggucaagaaugaacuucugcccaaccucgagaaagaaggcaugcagauuugucugcaugagcgcaauuuugugccuggcaaguccaucguggagaacaucauuaccugcaucgaaaagagcuacaagucuauuuucguucuguccccgaauuuuguccagagcgaguggugucacuacgaacuuuauuucgcccaucacaaccuguuucacgaggggucuaauucccucauccugauucuccuggaacccaucccucaauacagcauccccucuuccuaucauaaacuuaaaagccugauggcgagacggacauaccucgaguggccuaaggagaaauccaagagaggacuguucugggccaaccugcgcgcugccauuaauaucaaacuuaccgaacaggcuaagaaauga

SEQ ID NO: 9543 - protein, 786 aa, Artificial Sequence [sequence omitted]

SEQ ID NO: 9544 - RNA, 2361 nt, Artificial Sequence
  TLR1__Homo_sapiens__AAY85642
augacuagcaucuuccauuuugccauuaucuucauguuaauacuucagaucagaauacaauuaucugaagaaagugaauuuuuaguugauaggucaaaaaacggucucauccauguuccuaaagaccuaucccagaaaacaacaaucuuaaauauaucgcaaaauuauauaucugagcuuuggacuucugacaucuuaucacugucaaaacugaggauuuugauaauuucucauaauagaauccaguaucuugauaucaguguuuucaaauucaaccaggaauuggaauacuuggauuugucccacaacaaguuggugaagauuucuugccacccuacugugaaccucaagcacuuggaccugucauuuaaugcauuugaugcccugccuauaugcaaagaguuuggcaauaugucucaacuaaaauuucugggguugagcaccacacacuuagaaaaaucuagugugcugccaauugcucauuugaauaucagcaaggucuugcuggucuuaggagagacuuauggggaaaaagaagacccugagggccuucaagacuuuaacacugagagucugcacauuguguuccccacaaacaaagaauuccauuuuauuuuggaugugucagucaagacuguagcaaaucuggaacuaucuaauaucaaaugugugcuagaagauaacaaauguucuuacuuccuaaguauucuggcgaaacuucaaacaaauccaaaguuaucaagucuuaccuuaaacaacauugaaacaacuuggaauucuuucauuaggauccuccagcugguuuggcauacaacuguaugguauuucucaauuucaaacgugaagcuacagggucagcuggacuucagagauuuugauuauucuggcacuuccuugaaggccuugucuauacuccaaguugucagcgauguguucgguuuuccgcaaaguuauaucuaugaaaucuuuucgaauaugaacaucaaaaauuucacagugucugguacacgcaugguccacaugcuuugcccauccaaaauuagcccguuccugcauuuggauuuuuccaauaaucucuuaacagacacgguuuuugaaaauugugggcaccuuacugaguuggagacacuuauuuuacaaaugaaucaauuaaaagaacuuucaaaaauagcugaaaugacuacacagaugaagucucugcaacaauuggauauuagccagaauucuguaagcuaugaugaaaagaaaggagacuguucuuggacuaaaaguuuauuaaguuuaaauaugucuucaaauauacuuacugacacuauuuucagauguuuaccucccaggaucaagguacuugaucuucacagcaauaaaauaaagagcauuccuaaacaagucguaaaacuggaagcuuugcaagaacucaauguugcuuucaauucuuuaacugaccuuccuggauguggcagcuuuagcagccuuucuguauugaucauugaucacaauucaguuucccacccaucagcugauuucuuccagagcugccagaagaugaggucaauaaaagcaggggacaauccauuccaauguaccugugagcuaggagaauuugucaaaaauauagaccaaguaucaagugaaguguuagagggcuggccugauucuuauaagugugacuacccggaaaguuauagaggaacccuacuaaaggacuuucacaugucugaauuauccugcaacauaacucugcugaucgucaccaucguugccaccaugcugguguuggcugugacugugaccucccucugcaucuacuuggaucugcccugguaucucaggauggugugccaguggacccagacccggcgcagggccaggaacauacccuuagaagaacuccaaagaaaucuccaguuucaugcauuuauuucauauagugggcacgauucuuucugggugaagaaugaauuauugccaaaccuagagaaagaagguaugcagauuugccuucaugagagaaacuuuguuccuggcaagagcauuguggaaaauaucaucaccugcauugagaagaguuacaaguccaucuuuguuuugucucccaacuuuguccagagugaauggugccauuaugaacucuacuuugcccaucacaaucucuuucaugaaggaucuaauagcuuaauccugaucuugcuggaacccauuccgcaguacuccauuccuagcaguuaucacaagcucaaaagucucauggccaggaggacuuauuuggaauggcccaaggaaaagagcaaacguggccuuuuuugggcuaacuuaagggcagccauuaauauuaagcugacagagcaagcaaagaaauag

SEQ ID NO: 9545 - RNA, 2361 nt, Artificial Sequence
  derived and/or modified sequence opt1 from TLR1__Homo_sapiens__AAY85642
augaccagcaucuuccacuucgccaucaucuucaugcugauccuccagauccgcauccagcuguccgaggagagcgaguuccugguggaccgguccaagaacggccucauccacguccccaaggaccugagccagaagaccacgauccugaacaucucccagaacuacaucagcgagcucuggaccuccgacauccugagccuguccaagcuccgcauccugaucaucagccacaaccggauccaguaccuggacaucuccguguucaaguucaaccaggagcucgaguaccuggaccugagccacaacaagcucgugaagaucuccugccacccgaccgucaaccugaagcaccuggaccucagcuucaacgccuucgacgcgcugcccaucugcaaggaguucgggaacaugucccagcugaaguuccucggccugagcaccacgcaccuggagaaguccagcgugcuccccaucgcccaccugaacaucuccaaggugcugcucguccugggggagaccuacggcgagaaggaggaccccgaggggcugcaggacuucaacaccgagagccuccacaucguguucccgaccaacaaggaguuccacuucauccuggacgugagcgucaagacgguggccaaccuggagcucuccaacaucaagugcgugcuggaggacaacaagugcagcuacuuccuguccauccucgccaagcugcagaccaaccccaagcugagcucccucacccugaacaacaucgagaccacguggaacagcuucauccgcauccugcagcucgucuggcacaccaccgugugguacuucuccaucagcaacgugaagcugcagggccagcuggacuuccgggacuucgacuacuccggcaccagccucaaggcccuguccauccugcaggucgugagcgacguguucggguucccccaguccuacaucuacgagaucuucagcaacaugaacaucaagaacuucacggucuccggcacccgcauggugcacaugcucugccccagcaagaucuccccguuccugcaccuggacuucagcaacaaccugcucaccgacaccguguucgagaacugcgggcaccugacggagcuggagacccucauccugcagaugaaccagcugaaggagcucuccaagaucgcggagaugaccacccagaugaagucccugcagcagcuggacaucagccagaacagcgucagcuacgacgagaagaagggcgacugcuccuggaccaagagccuccugucccugaacaugagcuccaacauccucaccgacaccaucuuccggugccugccgccccgcaucaaggugcuggaccuccacagcaacaagaucaaguccauccccaagcaggucgugaagcuggaggcccugcaggagcucaacguggccuucaacagccugaccgaccugcccgggugcggcuccuucagcucccucagcguccugaucaucgaccacaacuccgugagccaccccuccgccgacuucuuccagagcugccagaagaugcggagcaucaaggcgggcgacaaccccuuccagugcacgugcgagcugggggaguucgugaagaacaucgaccaggucuccagcgaggugcucgagggcuggcccgacuccuacaagugcgacuacccggagagcuaccgcgggacccugcugaaggacuuccacauguccgagcucagcugcaacaucacccugcugaucgugaccaucgucgccacgaugcucgugcuggccgugaccgucaccucccugugcaucuaccucgaccugcccugguaccugcggauggugugccaguggacccagacgcgccggcgcgcccggaacaucccccucgaggagcugcagcgcaaccugcaguuccacgccuucaucagcuacuccggccacgacagcuucugggugaagaacgagcuccugcccaaccuggagaaggagggcaugcagaucugccuccacgagcggaacuucgucccggggaaguccaucguggagaacaucaucacgugcaucgagaaguccuacaagagcaucuucgugcugagccccaacuucguccaguccgaguggugccacuacgagcuguacuucgcgcaccacaaccucuuccacgagggcagcaacucccugauccugauccuccuggagcccaucccccaguacagcaucccguccagcuaccacaagcucaagagccugauggcccgccggaccuaccuggaguggcccaaggagaaguccaagcgcgggcuguucugggccaaccuccgggccgccaucaacaucaagcugaccgagcaggcgaagaaguga

SEQ ID NO: 9546 - RNA, 2361 nt, Artificial Sequence
  derived and/or modified sequence opt2 from TLR1__Homo_sapiens__AAY85642
augaccuccaucuuccacuucgccaucaucuucaugcucauccuccagauccgcauccagcucuccgaggaguccgaguuccucgucgaccgcuccaagaacggccucauccacguccccaaggaccucucccagaagaccaccauccucaacaucucccagaacuacaucuccgagcucuggaccuccgacauccucucccucuccaagcuccgcauccucaucaucucccacaaccgcauccaguaccucgacaucuccgucuucaaguucaaccaggagcucgaguaccucgaccucucccacaacaagcucgucaagaucuccugccaccccaccgucaaccucaagcaccucgaccucuccuucaacgccuucgacgcccuccccaucugcaaggaguucggcaacaugucccagcucaaguuccucggccucuccaccacccaccucgagaaguccuccguccuccccaucgcccaccucaacaucuccaagguccuccucguccucggcgagaccuacggcgagaaggaggaccccgagggccuccaggacuucaacaccgagucccuccacaucgucuuccccaccaacaaggaguuccacuucauccucgacgucuccgucaagaccgucgccaaccucgagcucuccaacaucaagugcguccucgaggacaacaagugcuccuacuuccucuccauccucgccaagcuccagaccaaccccaagcucuccucccucacccucaacaacaucgagaccaccuggaacuccuucauccgcauccuccagcucgucuggcacaccaccgucugguacuucuccaucuccaacgucaagcuccagggccagcucgacuuccgcgacuucgacuacuccggcaccucccucaaggcccucuccauccuccaggucgucuccgacgucuucggcuucccccaguccuacaucuacgagaucuucuccaacaugaacaucaagaacuucaccgucuccggcacccgcaugguccacaugcucugccccuccaagaucucccccuuccuccaccucgacuucuccaacaaccuccucaccgacaccgucuucgagaacugcggccaccucaccgagcucgagacccucauccuccagaugaaccagcucaaggagcucuccaagaucgccgagaugaccacccagaugaagucccuccagcagcucgacaucucccagaacuccgucuccuacgacgagaagaagggcgacugcuccuggaccaagucccuccucucccucaacauguccuccaacauccucaccgacaccaucuuccgcugccuccccccccgcaucaagguccucgaccuccacuccaacaagaucaaguccauccccaagcaggucgucaagcucgaggcccuccaggagcucaacgucgccuucaacucccucaccgaccuccccggcugcggcuccuucuccucccucuccguccucaucaucgaccacaacuccgucucccaccccuccgccgacuucuuccaguccugccagaagaugcgcuccaucaaggccggcgacaaccccuuccagugcaccugcgagcucggcgaguucgucaagaacaucgaccaggucuccuccgagguccucgagggcuggcccgacuccuacaagugcgacuaccccgaguccuaccgcggcacccuccucaaggacuuccacauguccgagcucuccugcaacaucacccuccucaucgucaccaucgucgccaccaugcucguccucgccgucaccgucaccucccucugcaucuaccucgaccuccccugguaccuccgcauggucugccaguggacccagacccgccgccgcgcccgcaacaucccccucgaggagcuccagcgcaaccuccaguuccacgccuucaucuccuacuccggccacgacuccuucugggucaagaacgagcuccuccccaaccucgagaaggagggcaugcagaucugccuccacgagcgcaacuucguccccggcaaguccaucgucgagaacaucaucaccugcaucgagaaguccuacaaguccaucuucguccucucccccaacuucguccaguccgaguggugccacuacgagcucuacuucgcccaccacaaccucuuccacgagggcuccaacucccucauccucauccuccucgagcccaucccccaguacuccauccccuccuccuaccacaagcucaagucccucauggcccgccgcaccuaccucgaguggcccaaggagaaguccaagcgcggccucuucugggccaaccuccgcgccgccaucaacaucaagcucaccgagcaggccaagaaguga

SEQ ID NO: 9547 - RNA, 2361 nt, Artificial Sequence
  derived and/or modified sequence opt3 from TLR1__Homo_sapiens__AAY85642
augaccagcaucuuccacuuugccauuauauucaugcugauccuccagauuagaauccaacuuuccgaggaaucugaguuucugguggacaggucaaagaacggcuugauucauguccccaaagauuuaagucagaagacaacuauccugaauauaagccagaacuacaucuccgaacuauggacgucugacauucucucgcugucaaaacuucggauccugauuaucagccacaaucgcauacaguauuuggauauuaguguuuucaaguuuaaccaagagcucgaauaccuggaccugucccauaauaaacucgugaagaucucuugccacccuaccguaaacuuaaagcaucuggaucuuagcuucaaugcuuuugacgcauugccaauuuguaaagaguucgggaacaugucccagcugaaguuucuaggacucucaacaacucaccuggagaaaaguagcgugcuuccgaucgcccaccugaauaucucuaaggucuugcucgugcugggugaaaccuauggcgagaaagaagaucccgagggguuacaggacuucaacacagagucccugcauauuguuuuuccuaccaauaaggaguuccacuuuauacucgaugugucagucaagacuguggcgaaccuugaacugagcaauaucaaaugcguauuggaagacaacaaguguaguuacuuccuaucuauucuggcuaaacuccagacaaauccaaagcuguccagccuuacccugaacaacaucgagacgacuuggaauaguuucauacgaauuuugcaacucguuuggcauaccacagugugguauuuuucuaucuccaacgucaaacugcagggacaguuagauuuccgugacuuugauuacucaggcacuucgcugaaggcccuaagcauccuccaggugguguccgacgucuucgguuuuccccaaucuuauauuuacgaaaucuucagcaauaugaacauuaaaaauuuuaccguuucagggacaagaauggugcacaugcugugcccuaguaagauauccccauuccuucacuuggacuuuagcaacaaucugcucaccgauacgguauucgagaacuguggacaucugacugagcuugaaacacugaucuugcagaugaaucagcucaaggagcugucuaaaauugcagaaaugaccacucaaaugaagucauuacagcagcuggacaucagucagaacagcguguccuacgaugagaaaaagggcgacugcucuuggacaaaaucgcuacucagccugaauauguccucaaacauccuuaccgauacgauuuuuagguguuugcccccucggauaaagguccuggaccuccacaguaauaagaucaaaucuauuccaaagcaagugguuaaacuggaagccuuacaggagcugaacguggcuuucaauagccuuaccgauuugccgggcugcggguccuuuucaagccucucuguccugaucauugaccauaacuccgugagucaccccagcgcagauuucuuccagucuugucagaagaugcgcuccaucaaagccggagacaacccuuuucaaugcacaugugagcuaggugaguucguaaagaauauagaucagguuucaagugaagugcuggaaggcuggccagacagcuauaagugcgacuaccccgagucguauagagggacucuccugaaagauuuucauauguccgaacuuucuugcaacaucaccuugcugauugucacaaucguggcuacuauguuaguccucgccgugaccguuacaagccuguguauuuaccuugaccugccuugguauuugaggauggugugccaguggacccagacucggcgccgagcgagaaauaucccacucgaggagcugcaaaggaaccuacaguuccacgcauuuauaucauacaguggacacgauuccuucuggguaaagaaugaacugcuccccaaccuggagaaagaaggcaugcagauuugucuucaugagcggaauuuugucccggguaagucuaucguggagaacauuaucacgugcauagagaaaagcuauaaguccaucuucguuuugucaccuaauuuugugcagagcgaauggugucacuacgaacuguacuucgcccaucacaacuuauuucacgaggggaguaauucucucauucugauccuucuggaacccauuccacaauauuccaucccuagcucguaccauaagcuaaaaucacucauggcucgucgcacauaucuggaguggcccaaggagaaaucuaagagaggauuguucugggccaaccugagggcagcuauaaauauuaaauuaaccgaacaggccaagaaauga

SEQ ID NO: 9548 - RNA, 2361 nt, Artificial Sequence
  derived and/or modified sequence opt4 from TLR1__Homo_sapiens__AAY85642
augaccagcaucuuccacuucgccaucaucuucaugcugauccugcagaucagaauccagcugagcgaggagagcgaguuccugguggacagaagcaagaacggccugauccacgugcccaaggaccugagccagaagaccaccauccugaacaucagccagaacuacaucagcgagcuguggaccagcgacauccugagccugagcaagcugagaauccugaucaucagccacaacagaauccaguaccuggacaucagcguguucaaguucaaccaggagcuggaguaccuggaccugagccacaacaagcuggugaagaucagcugccaccccaccgugaaccugaagcaccuggaccugagcuucaacgccuucgacgcccugcccaucugcaaggaguucggcaacaugagccagcugaaguuccugggccugagcaccacccaccuggagaagagcagcgugcugcccaucgcccaccugaacaucagcaaggugcugcuggugcugggcgagaccuacggcgagaaggaggaccccgagggccugcaggacuucaacaccgagagccugcacaucguguuccccaccaacaaggaguuccacuucauccuggacgugagcgugaagaccguggccaaccuggagcugagcaacaucaagugcgugcuggaggacaacaagugcagcuacuuccugagcauccuggccaagcugcagaccaaccccaagcugagcagccugacccugaacaacaucgagaccaccuggaacagcuucaucagaauccugcagcugguguggcacaccaccgugugguacuucagcaucagcaacgugaagcugcagggccagcuggacuucagagacuucgacuacagcggcaccagccugaaggcccugagcauccugcagguggugagcgacguguucggcuucccccagagcuacaucuacgagaucuucagcaacaugaacaucaagaacuucaccgugagcggcaccagaauggugcacaugcugugccccagcaagaucagccccuuccugcaccuggacuucagcaacaaccugcugaccgacaccguguucgagaacugcggccaccugaccgagcuggagacccugauccugcagaugaaccagcugaaggagcugagcaagaucgccgagaugaccacccagaugaagagccugcagcagcuggacaucagccagaacagcgugagcuacgacgagaagaagggcgacugcagcuggaccaagagccugcugagccugaacaugagcagcaacauccugaccgacaccaucuucagaugccugccccccagaaucaaggugcuggaccugcacagcaacaagaucaagagcauccccaagcagguggugaagcuggaggcccugcaggagcugaacguggccuucaacagccugaccgaccugcccggcugcggcagcuucagcagccugagcgugcugaucaucgaccacaacagcgugagccaccccagcgccgacuucuuccagagcugccagaagaugagaagcaucaaggccggcgacaaccccuuccagugcaccugcgagcugggcgaguucgugaagaacaucgaccaggugagcagcgaggugcuggagggcuggcccgacagcuacaagugcgacuaccccgagagcuacagaggcacccugcugaaggacuuccacaugagcgagcugagcugcaacaucacccugcugaucgugaccaucguggccaccaugcuggugcuggccgugaccgugaccagccugugcaucuaccuggaccugcccugguaccugagaauggugugccaguggacccagaccagaagaagagccagaaacaucccccuggaggagcugcagagaaaccugcaguuccacgccuucaucagcuacagcggccacgacagcuucugggugaagaacgagcugcugcccaaccuggagaaggagggcaugcagaucugccugcacgagagaaacuucgugcccggcaagagcaucguggagaacaucaucaccugcaucgagaagagcuacaagagcaucuucgugcugagccccaacuucgugcagagcgaguggugccacuacgagcuguacuucgcccaccacaaccuguuccacgagggcagcaacagccugauccugauccugcuggagcccaucccccaguacagcauccccagcagcuaccacaagcugaagagccugauggccagaagaaccuaccuggaguggcccaaggagaagagcaagagaggccuguucugggccaaccugagagccgccaucaacaucaagcugaccgagcaggccaagaaguga

SEQ ID NO: 9549 - RNA, 2361 nt, Artificial Sequence
  derived and/or modified sequence opt5 from TLR1__Homo_sapiens__AAY85642
augaccagcaucuuccacuuugccauuaucuucaugcugauucuccagauccggauucaacuguccgaggaaucugaguuucuuguggacagaagcaagaacggccugauccauguccccaaagaucucucccagaagacaacgauccugaauauuucucagaacuacaucagcgaacuuuggaccuccgacauucugucucucagcaaacugcgcauccugauuaucucccacaauagaauccaguaucucgauauuagcguuuucaaguuuaaccaagagcuggaauaccuugaccugucucauaauaaacucgugaagaucuccugccacccuacagugaaccugaagcaucuugaucugagcuucaaugcuuuugacgcccucccgauuuguaaagaguucgggaacaugucucagcugaaguuucugggacucuccaccacacaccuggagaaaagcucuguccuucccaucgcgcaccugaauauuuccaaggugcuccugguucuuggcgaaaccuauggggagaaagaagauccugagggacugcaggacuucaacacagagagccuccauaucguguuucccaccaauaaggaguuccacuuuauucuggaugucuccgugaagacgguugcuaaccuggaacucucuaauaucaaaugcgugcuggaagacaacaaguguagcuacuuccuuuccauccuggccaaacuccagaccaauccuaagcugagcucucuuacacugaacaacauugagaccacauggaacuccuucauccggauucuccaacuggucuggcauaccacggugugguauuuuagcaucucuaaugugaaacugcagggccagcucgauuuccgcgacuuugauuacagcgggacaucccugaaggcccuuucuauucugcaggucguuagcgacguguucggauuuccccaauccuauaucuacgaaaucuucagcaauaugaacauuaaaaauuuuaccgugucuggcacaagaaugguccacaugcucugcccuuccaagaucagcccguuccugcaccuggacuuuucuaacaaucuucucaccgauaccguguucgagaacuguggccaucugacagagcuggaaacgcucauucugcagaugaaucagcuuaaggagcuguccaaaaucgcugaaaugaccacacaaaugaaaagccuccagcagcuggacauuucccagaacucuguuagcuacgaugagaaaaagggggacugcuccuggaccaaaucucugcuuagccucaauauguccagcaacauccugacagauaccauuuuucggugucugcccccucgcaucaaggugcucgaccugcacucuaauaagaucaaauccauucccaagcaagucgugaaacuugaagcccugcaggagcucaacguugcuuucaauagccugacggaucugccuggaugcggcucuuuuuccagccuuucugugcucaucauugaccauaacagcgucucccaccccagcgccgauuucuuccagucuugucagaagaugagauccaucaaagcgggggacaacccguuucaaugcacaugugagcugggagaguucgugaagaauauugaucaggucagcuccgaagugcuggaaggcuggccugacucuuauaagugcgacuaccccgagagcuaucgggggacccuccugaaagauuuucauauguccgaacuuucuugcaacaucacccugcucaucguuacaauuguggccaccaugcugguccuggcugugacaguuacgagccuuuguaucuaccucgaccugccuugguaucugcgcauggugugccaguggacccagacaagacggcgcgccagaaauauuccccucgaggagcugcaacggaaccuucaguuccacgcuuuuaucuccuacucuggacacgauagcuucugggucaagaaugaacugcuccccaaccuggagaaagaaggcaugcagauuugucugcaugagcgcaauuuugugccuggcaaguccaucguggagaacaucauuaccugcaucgaaaagagcuauaagucuauuuucguucuuuccccgaauuuuguccagagcgaguggugucacuacgaacuguacuucgcccaucacaaccucuuucacgaggggucuaauucccugauccucauucugcuugaacccaucccucaauauagcauccccucuuccuaccauaagcugaaaagccucauggcgagacggacauaucuggaguggccuaaggagaaauccaagagaggacuguucugggccaaccuucgcgcugccauuaauaucaaacugaccgaacaggcuaagaaauga

SEQ ID NO: 9550 - protein, 786 aa, Artificial Sequence [sequence omitted]

SEQ ID NO: 9551 - RNA, 2361 nt, Artificial Sequence
  TLR1__Homo_sapiens__AAY85643
augacuagcaucuuccauuuugccauuaucuucauguuaauacuucagaucagaauacaauuaucugaagaaagugaauuuuuaguugauaggucaaaaaacggucucauccacguuccuaaagaccuaucccagaaaacaacaaucuuaaauauaucgcaaaauuauaugucugagcuuuggacuucugacaucuuaucacugucaaaacugaggauuuugauaauuucucauaauagaauccaguaucuugauaucaguguuuucaaauucaaccaggaauuggaauacuuggauuugucccacaacaaguuggugaagauuucuugccacccuacugugaaccucaagcacuuggaccugucauuuaaugcauuugaugcccugccuauaugcaaagaguuuggcaauaugucucaacuaaaauuucugggguugagcaccacacacuuagaaaaaucuagugugcugccaauugcucauuugaauaucagcaaggucuugcuggucuuaggagagacuuauggggaaaaagaagacccugagggccuucaagacuuuaacacugagagucugcacauuguguuccccacaaacaaagaauuccauuuuauuuuggaugugucagucaagacuguagcaaaucuggaacuaucuaauaucaaaugugugcuagaagauaacaaauguucuuacuuccuaaguauucuggcgaaacuucaaacaaauccaaaguuaucaagucuuaccuuaaacaacauugaaacaacuuggaauucuuucauuaggauccuccagcugguuuggcauacaacuguaugguauuucucaauuucaaacgugaagcuacagggucagcuggacuucagagauuuugauuauucuggcacuuccuugaaggccuugucuauacaccaaguugucagcgauguguucgguuuuccgcaaaguuauaucuaugaaaucuuuucgaauaugaacaucaaaaauuucacagugucugguacacgcaugguccacaugcuuugcccauccaaaauuagcccguuccugcauuuggauuuuuccaauaaucucuuaacagacacgguuuuugaaaauugugggcaccuuacugaguuggagacacuuauuuuacaaaugaaucaauuaaaagaacuuucaaaaauagcugaaaugacuacacagaugaagucucugcaacaauuggauauuagccagaauucuguaagcuaugaugaaaagaaaggagacuguucuuggacuaaaaguuuauuaaguuuaaauaugucuucaaauauacuuacugacacuauuuucagauguuuaccucccaggaucaagguacuugaucuucacagcaauaaaauaaagagcauuccuaaacaagucguaaaacuggaagcuuugcaagaacucaauguugcuuucaauucuuuaacugaccuuccuggauguggcagcuuuagcagccuuucuguauugaucauugaucacaauucaguuucccacccaucagcugauuucuuccagagcugccagaagaugaggucaauaaaagcaggggacaauccauuccaauguaccugugagcuaggagaauuugucaaaaauauagaccaaguaucaagugaaguguuagagggcuggccugauucuuauaagugugacuacccggaaaguuauagaggaacccuacuaaaggacuuucacaugucugaauuauccugcaacauaacucugcugaucgucaccaucguugccaccaugcugguguuggcugugacugugaccucccucugcaucuacuuggaucugcccugguaucucaggauggugugccaguggacccagacccggcgcagggccaggaacauacccuuagaagaacuccaaagaaaucuccaguuucaugcauuuauuucauauagugggcacgauucuuucugggugaagaaugaauuauugccaaaccuagagaaagaagguaugcagauuugccuucaugagagaaacuuuguuccuggcaagagcauuguggaaaauaucaucaccugcauugagaagaguuacaaguccaucuuuguuuugucucccaacuuuguccagagugaauggugccauuaugaacucuacuuugcccaucacaaucucuuucaugaaggaucuaauagcuuaauccugaucuugcuggaacccauuccgcaguacuccauuccuagcaguuaucacaagcucaaaagucucauggccaggaggacuuauuuggaauggcccaaggaaaagagcaaacguggccuuuuuugggcuaacuuaagggcagccauuaauauuaagcugacagagcaagcaaagaaauag

SEQ ID NO: 9552 - RNA, 2361 nt, Artificial Sequence
  derived and/or modified sequence opt1 from TLR1__Homo_sapiens__AAY85643
augaccagcaucuuccacuucgccaucaucuucaugcugauccuccagauccgcauccagcuguccgaggagagcgaguuccugguggaccgguccaagaacggccucauccacguccccaaggaccugagccagaagaccacgauccugaacaucucccagaacuacaugagcgagcucuggaccuccgacauccugagccuguccaagcuccgcauccugaucaucagccacaaccggauccaguaccuggacaucuccguguucaaguucaaccaggagcucgaguaccuggaccugagccacaacaagcucgugaagaucuccugccacccgaccgucaaccugaagcaccuggaccucagcuucaacgccuucgacgcgcugcccaucugcaaggaguucgggaacaugucccagcugaaguuccucggccugagcaccacgcaccuggagaaguccagcgugcuccccaucgcccaccugaacaucuccaaggugcugcucguccugggggagaccuacggcgagaaggaggaccccgaggggcugcaggacuucaacaccgagagccuccacaucguguucccgaccaacaaggaguuccacuucauccuggacgugagcgucaagacgguggccaaccuggagcucuccaacaucaagugcgugcuggaggacaacaagugcagcuacuuccuguccauccucgccaagcugcagaccaaccccaagcugagcucccucacccugaacaacaucgagaccacguggaacagcuucauccgcauccugcagcucgucuggcacaccaccgugugguacuucuccaucagcaacgugaagcugcagggccagcuggacuuccgggacuucgacuacuccggcaccagccucaaggcccuguccauccaccaggucgugagcgacguguucggguucccccaguccuacaucuacgagaucuucagcaacaugaacaucaagaacuucacggucuccggcacccgcauggugcacaugcugugccccagcaagaucuccccguuccuccaccuggacuucagcaacaaccugcugaccgacaccguguucgagaacugcgggcaccucacggagcuggagacccugauccuccagaugaaccagcugaaggagcuguccaagaucgcggagaugaccacccagaugaagucccuccagcagcuggacaucagccagaacagcgucagcuacgacgagaagaagggcgacugcuccuggaccaagagccugcucucccugaacaugagcuccaacauccugaccgacaccaucuuccggugccucccgccccgcaucaaggugcuggaccugcacagcaacaagaucaaguccauccccaagcaggucgugaagcucgaggcccugcaggagcugaacguggccuucaacagccucaccgaccugcccgggugcggcuccuucagcucccugagcguccucaucaucgaccacaacuccgugagccaccccuccgccgacuucuuccagagcugccagaagaugcggagcaucaaggcgggcgacaaccccuuccagugcacgugcgagcugggggaguucgugaagaacaucgaccaggucuccagcgaggugcuggagggcuggcccgacuccuacaagugcgacuacccggagagcuaccgcgggacccuccugaaggacuuccacauguccgagcugagcugcaacaucacccuccugaucgugaccaucgucgccacgaugcuggugcucgccgugaccgucaccucccugugcaucuaccuggaccuccccugguaccugcggauggugugccaguggacccagacgcgccggcgcgcccggaacaucccccuggaggagcuccagcgcaaccugcaguuccacgccuucaucagcuacuccggccacgacagcuucugggugaagaacgagcugcuccccaaccuggagaaggagggcaugcagaucugccugcacgagcggaacuucgucccggggaaguccaucguggagaacaucaucacgugcaucgagaaguccuacaagagcaucuucgugcucagccccaacuucguccaguccgaguggugccacuacgagcuguacuucgcgcaccacaaccuguuccacgagggcagcaacucccucauccugauccugcucgagcccaucccccaguacagcaucccguccagcuaccacaagcucaagagccugauggcccgccggaccuaccuggaguggcccaaggagaaguccaagcgcgggcuguucugggccaaccugcgggccgccaucaacaucaagcucaccgagcaggcgaagaaguga

SEQ ID NO: 9553 - RNA, 2361 nt, Artificial Sequence
  derived and/or modified sequence opt2 from TLR1__Homo_sapiens__AAY85643
augaccuccaucuuccacuucgccaucaucuucaugcucauccuccagauccgcauccagcucuccgaggaguccgaguuccucgucgaccgcuccaagaacggccucauccacguccccaaggaccucucccagaagaccaccauccucaacaucucccagaacuacauguccgagcucuggaccuccgacauccucucccucuccaagcuccgcauccucaucaucucccacaaccgcauccaguaccucgacaucuccgucuucaaguucaaccaggagcucgaguaccucgaccucucccacaacaagcucgucaagaucuccugccaccccaccgucaaccucaagcaccucgaccucuccuucaacgccuucgacgcccuccccaucugcaaggaguucggcaacaugucccagcucaaguuccucggccucuccaccacccaccucgagaaguccuccguccuccccaucgcccaccucaacaucuccaagguccuccucguccucggcgagaccuacggcgagaaggaggaccccgagggccuccaggacuucaacaccgagucccuccacaucgucuuccccaccaacaaggaguuccacuucauccucgacgucuccgucaagaccgucgccaaccucgagcucuccaacaucaagugcguccucgaggacaacaagugcuccuacuuccucuccauccucgccaagcuccagaccaaccccaagcucuccucccucacccucaacaacaucgagaccaccuggaacuccuucauccgcauccuccagcucgucuggcacaccaccgucugguacuucuccaucuccaacgucaagcuccagggccagcucgacuuccgcgacuucgacuacuccggcaccucccucaaggcccucuccauccaccaggucgucuccgacgucuucggcuucccccaguccuacaucuacgagaucuucuccaacaugaacaucaagaacuucaccgucuccggcacccgcaugguccacaugcucugccccuccaagaucucccccuuccuccaccucgacuucuccaacaaccuccucaccgacaccgucuucgagaacugcggccaccucaccgagcucgagacccucauccuccagaugaaccagcucaaggagcucuccaagaucgccgagaugaccacccagaugaagucccuccagcagcucgacaucucccagaacuccgucuccuacgacgagaagaagggcgacugcuccuggaccaagucccuccucucccucaacauguccuccaacauccucaccgacaccaucuuccgcugccuccccccccgcaucaagguccucgaccuccacuccaacaagaucaaguccauccccaagcaggucgucaagcucgaggcccuccaggagcucaacgucgccuucaacucccucaccgaccuccccggcugcggcuccuucuccucccucuccguccucaucaucgaccacaacuccgucucccaccccuccgccgacuucuuccaguccugccagaagaugcgcuccaucaaggccggcgacaaccccuuccagugcaccugcgagcucggcgaguucgucaagaacaucgaccaggucuccuccgagguccucgagggcuggcccgacuccuacaagugcgacuaccccgaguccuaccgcggcacccuccucaaggacuuccacauguccgagcucuccugcaacaucacccuccucaucgucaccaucgucgccaccaugcucguccucgccgucaccgucaccucccucugcaucuaccucgaccuccccugguaccuccgcauggucugccaguggacccagacccgccgccgcgcccgcaacaucccccucgaggagcuccagcgcaaccuccaguuccacgccuucaucuccuacuccggccacgacuccuucugggucaagaacgagcuccuccccaaccucgagaaggagggcaugcagaucugccuccacgagcgcaacuucguccccggcaaguccaucgucgagaacaucaucaccugcaucgagaaguccuacaaguccaucuucguccucucccccaacuucguccaguccgaguggugccacuacgagcucuacuucgcccaccacaaccucuuccacgagggcuccaacucccucauccucauccuccucgagcccaucccccaguacuccauccccuccuccuaccacaagcucaagucccucauggcccgccgcaccuaccucgaguggcccaaggagaaguccaagcgcggccucuucugggccaaccuccgcgccgccaucaacaucaagcucaccgagcaggccaagaaguga

SEQ ID NO: 9554 - RNA, 2361 nt, Artificial Sequence
  derived and/or modified sequence opt3 from TLR1__Homo_sapiens__AAY85643
augaccagcaucuuccacuuugccauuauauucaugcugauccuccagauuagaauccaacuuuccgaggaaucugaguuucugguggacaggucaaagaacggcuugauucauguccccaaagauuuaagucagaagacaacuauccugaauauaagccagaacuacauguccgaacuauggacgucugacauccucucgcugucaaaacuucggauucugaucauuagccacaaucgcauccaguauuuggauauaaguguuuucaaguuuaaccaagagcucgaauaccuggaccugucccauaauaaacucgugaagauuucuugccacccuaccguaaacuuaaagcaucuggaucuuagcuucaaugcuuuugacgcauugccaaucuguaaagaguucgggaacaugucccagcugaaguuucuaggacucucaacaacucaccuggagaaaaguagcgugcuuccgauugcccaccugaauaucucuaaggucuugcucgugcugggugaaaccuauggcgagaaagaagaucccgagggguuacaggacuucaacacagagucccugcauaucguuuuuccuaccaauaaggaguuccacuuuauucucgaugugucagucaagacuguggcgaaccuugaacugagcaauauaaaaugcguauuggaagacaacaaguguaguuacuuccuaucuauccuggcuaaacuccagacaaauccaaagcuguccagccuuacccugaacaacauugagacgacuuggaauagcuucauccgaauauugcaacucguuuggcauaccacagugugguauuuuucuauuuccaacgucaaacugcagggacaguuagauuuccgugacuuugauuacucaggcacuucacugaaggcccuaagcauccaccaggugguguccgacgucuucgguuuuccccaaucuuauaucuacgaaauuuucagcaauaugaacaucaaaaauuuuaccguuucagggacaagaauggugcacaugcucugcccuaguaagauuuccccauuccugcaucuugacuuuagcaacaauuugcugaccgauacgguauucgagaacuguggacaccucacugagcuggaaacacuuauacugcagaugaaucaguugaaggagcucucuaaaaucgcagaaaugaccacucaaaugaagucacugcagcaguuagacauuagucagaacagcguguccuacgaugagaaaaagggcgacugcucuuggacaaaaucgcugcuaagccucaauauguccucaaacauccugaccgauacgaucuuuaggugucuucccccucggauuaaggucuuggaccugcauaguaauaagauaaaaucuaucccaaagcaagugguuaaacucgaagcccugcaggaguuaaacguggcuuucaauagccugaccgaucuuccgggcugcggguccuuuaguagcuugucuguccucauuaucgaccacaacuccgugagucaucccagcgcagauuucuuccagucuugucagaagaugcgcuccauuaaagccggagacaacccuuuucaaugcacaugugagcugggugaguucguaaagaauaucgaucagguuucaagugaagugcuagaaggcuggccagacagcuauaagugcgacuaccccgagucguauagagggacucugcucaaagauuuucacauguccgaacugucuugcaacauaacccuuuugaucgucacaauuguggcuacuaugcuggucuuagccgugaccguuacaagccucuguaucuaccuggaccuuccuugguaucugaggauggugugccaguggacccagacucggcgccgagcgagaaauauuccauuggaggagcuccaaaggaaccugcaguuccacgcauuuaucucauacaguggacaugauuccuucuggguaaagaaugaacuacugcccaaccucgagaaagaaggcaugcagauaugucugcacgagcggaauuuugucccggguaagucuauuguggagaacaucauuacgugcaucgaaaaaucguauaaguccauauucguucuuucaccuaauuuugugcagagcgaguggugucauuacgaauuguacuucgcccaccacaaccuguuucaugaggggaguaauucuuuaauccucauucugcuugaacccaucccacaauauuccauuccuagcucguaccacaagcugaaaucacuaauggcucgucgcacauaucucgaguggcccaaggagaaaucuaagagaggacuguucugggccaacuugagggcagcuaucaauauaaaacugaccgaacaggccaagaaauga

SEQ ID NO: 9555 - RNA, 2361 nt, Artificial Sequence
  derived and/or modified sequence opt4 from TLR1__Homo_sapiens__AAY85643
augaccagcaucuuccacuucgccaucaucuucaugcugauccugcagaucagaauccagcugagcgaggagagcgaguuccugguggacagaagcaagaacggccugauccacgugcccaaggaccugagccagaagaccaccauccugaacaucagccagaacuacaugagcgagcuguggaccagcgacauccugagccugagcaagcugagaauccugaucaucagccacaacagaauccaguaccuggacaucagcguguucaaguucaaccaggagcuggaguaccuggaccugagccacaacaagcuggugaagaucagcugccaccccaccgugaaccugaagcaccuggaccugagcuucaacgccuucgacgcccugcccaucugcaaggaguucggcaacaugagccagcugaaguuccugggccugagcaccacccaccuggagaagagcagcgugcugcccaucgcccaccugaacaucagcaaggugcugcuggugcugggcgagaccuacggcgagaaggaggaccccgagggccugcaggacuucaacaccgagagccugcacaucguguuccccaccaacaaggaguuccacuucauccuggacgugagcgugaagaccguggccaaccuggagcugagcaacaucaagugcgugcuggaggacaacaagugcagcuacuuccugagcauccuggccaagcugcagaccaaccccaagcugagcagccugacccugaacaacaucgagaccaccuggaacagcuucaucagaauccugcagcugguguggcacaccaccgugugguacuucagcaucagcaacgugaagcugcagggccagcuggacuucagagacuucgacuacagcggcaccagccugaaggcccugagcauccaccagguggugagcgacguguucggcuucccccagagcuacaucuacgagaucuucagcaacaugaacaucaagaacuucaccgugagcggcaccagaauggugcacaugcugugccccagcaagaucagccccuuccugcaccuggacuucagcaacaaccugcugaccgacaccguguucgagaacugcggccaccugaccgagcuggagacccugauccugcagaugaaccagcugaaggagcugagcaagaucgccgagaugaccacccagaugaagagccugcagcagcuggacaucagccagaacagcgugagcuacgacgagaagaagggcgacugcagcuggaccaagagccugcugagccugaacaugagcagcaacauccugaccgacaccaucuucagaugccugccccccagaaucaaggugcuggaccugcacagcaacaagaucaagagcauccccaagcagguggugaagcuggaggcccugcaggagcugaacguggccuucaacagccugaccgaccugcccggcugcggcagcuucagcagccugagcgugcugaucaucgaccacaacagcgugagccaccccagcgccgacuucuuccagagcugccagaagaugagaagcaucaaggccggcgacaaccccuuccagugcaccugcgagcugggcgaguucgugaagaacaucgaccaggugagcagcgaggugcuggagggcuggcccgacagcuacaagugcgacuaccccgagagcuacagaggcacccugcugaaggacuuccacaugagcgagcugagcugcaacaucacccugcugaucgugaccaucguggccaccaugcuggugcuggccgugaccgugaccagccugugcaucuaccuggaccugcccugguaccugagaauggugugccaguggacccagaccagaagaagagccagaaacaucccccuggaggagcugcagagaaaccugcaguuccacgccuucaucagcuacagcggccacgacagcuucugggugaagaacgagcugcugcccaaccuggagaaggagggcaugcagaucugccugcacgagagaaacuucgugcccggcaagagcaucguggagaacaucaucaccugcaucgagaagagcuacaagagcaucuucgugcugagccccaacuucgugcagagcgaguggugccacuacgagcuguacuucgcccaccacaaccuguuccacgagggcagcaacagccugauccugauccugcuggagcccaucccccaguacagcauccccagcagcuaccacaagcugaagagccugauggccagaagaaccuaccuggaguggcccaaggagaagagcaagagaggccuguucugggccaaccugagagccgccaucaacaucaagcugaccgagcaggccaagaaguga

SEQ ID NO: 9556 - RNA, 2361 nt, Artificial Sequence
  derived and/or modified sequence opt5 from TLR1__Homo_sapiens__AAY85643
augaccagcaucuuccacuuugccauuaucuucaugcugauucuccagaucagaauccaacuguccgaggaaucugaguuucuuguggaccggagcaagaacggccugauccauguccccaaagaucucucccagaagacaacgauccugaauauuucucagaacuacaugagcgaacuuuggaccuccgacauccugucucucagcaaacugcgcauucugaucauuucccacaauagaauccaguaucucgauauuagcguuuucaaguuuaaccaagagcuggaauaccuugaccugucucauaauaaacucgugaagaucuccugccacccuacagugaaccugaagcaucuugaucugagcuucaaugcuuuugacgcccucccgaucuguaaagaguucgggaacaugucucagcugaaguuucugggacucuccaccacacaccuggagaaaagcucuguccuucccauugcgcaccugaauaucuccaaggugcuccugguucuuggcgaaaccuauggggagaaagaagauccugagggacugcaggacuucaacacagagagccuccauauuguguuucccaccaauaaggaguuccacuuuauccuggaugucuccgugaagacgguugcuaaccuggaacucucuaauauuaaaugcgugcuggaagacaacaaguguagcuacuuccuuuccauccuggccaaacuccagaccaauccuaagcugagcucucuuacacugaacaacaucgagaccacauggaauagcuucauucggauccuccaacuggucuggcauaccacggugugguauuuuagcauuucuaacgugaaacugcagggccagcucgauuuccgcgacuuugauuacagcgggacaucccugaaggcccuuucuauccaccaggucguuagcgacguguucggauuuccccaauccuauauuuacgaaaucuucagcaauaugaacaucaaaaauuuuaccgugucuggcacaagaaugguccacaugcugugcccuuccaagauuagcccguuccuccaucuggacuuuucuaacaaucugcuuaccgauaccguguucgagaacuguggccaccucacagagcuggaaacgcugauccuccagaugaaucagcugaaggagcuuuccaaaauugcugaaaugaccacacaaaugaagucccugcagcagcucgacaucucccagaacucuguuagcuacgaugagaaaaagggggacugcuccuggaccaaaucucugcugagccuuaauauguccagcaacauucucacagauaccaucuuucggugucugcccccucgcauuaaggugcuggaccuccauucuaauaagaucaaauccauccccaagcaagucgugaaacuggaagcccuucaggagcugaacguugcuuucaauagccucacggaucugccuggaugcggcucuuuuuccagccugucugugcuuauuaucgaccacaacagcgucucccaucccagcgccgauuucuuccagucuugucagaagaugagauccauuaaagcgggggacaacccguuucaaugcacaugugagcucggagaguucgugaagaauaucgaucaggucagcuccgaagugcuggaaggcuggccugacucuuauaagugcgacuaccccgagagcuaucgggggacccugcucaaagauuuucacauguccgaacugucuugcaacauuacccuucugaucguuacaaucguggccaccaugcucguccuggcugugacaguuacgagccuguguauuuaccuugaccucccuugguaucugcgcauggugugccaguggacccagacaagacggcgcgccagaaauaucccccuggaggagcuccaacggaaccugcaguuccacgcuuuuauuuccuacucuggacaugauagcuucugggucaagaaugaacuucugcccaaccucgagaaagaaggcaugcagaucugucugcacgagcgcaauuuugugccuggcaaguccauuguggagaacaucauuaccugcauugaaaagagcuauaagucuaucuucguucuguccccgaauuuuguccagagcgaguggugucauuacgaacuuuacuucgcccaccacaaccuguuucaugaggggucuaauucccucauucugauccuccuggaacccauuccucaauauagcauccccucuuccuaccacaaacuuaaaagccugauggcgagacggacauaucucgaguggccuaaggagaaauccaagagaggacuguucugggccaaccugcgcgcugccaucaauauuaaacuuaccgaacaggcuaagaaauga

SEQ ID NO: 9557 - protein, 786 aa, Artificial Sequence
  TLR1__Homo_sapiens__Q15399
MTSIFHFAIIFMLILQIRIQLSEESEFLVDRSKNGLIHVPKDLSQKTTILNISQNYISELWTSDILSLSKLRILIISHNRIQYLDISVFKFNQELEYLDLSHNKLVKISCHPTVNLKHLDLSFNAFDALPICKEFGNMSQLKFLGLSTTHLEKSSVLPIAHLNISKVLLVLGETYGEKEDPEGLQDFNTESLHIVFPTNKEFHFILDVSVKTVANLELSNIKCVLEDNKCSYFLSILAKLQTNPKLSNLTLNNIETTWNSFIRILQLVWHTTVWYFSISNVKLQGQLDFRDFDYSGTSLKALSIHQVVSDVFGFPQSYIYEIFSNMNIKNFTVSGTRMVHMLCPSKISPFLHLDFSNNLLTDTVFENCGHLTELETLILQMNQLKELSKIAEMTTQMKSLQQLDISQNSVSYDEKKGDCSWTKSLLSLNMSSNILTDTIFRCLPPRIKVLDLHSNKIKSIPKQVVKLEALQELNVAFNSLTDLPGCGSFSSLSVLIIDHNSVSHPSADFFQSCQKMRSIKAGDNPFQCTCELGEFVKNIDQVSSEVLEGWPDSYKCDYPESYRGTLLKDFHMSELSCNITLLIVTIVATMLVLAVTVTSLCSYLDLPWYLRMVCQWTQTRRRARNIPLEELQRNLQFHAFISYSGHDSFWVKNELLPNLEKEGMQICLHERNFVPGKSIVENIITCIEKSYKSIFVLSPNFVQSEWCHYELYFAHHNLFHEGSNSLILILLEPIPQYSIPSSYHKLKSLMARRTYLEWPKEKSKRGLFWANLRAAINIKLTEQAKK

SEQ ID NO: 9558 - RNA, 2361 nt, Artificial Sequence
  TLR1__Homo_sapiens__AAI09094
augacuagcaucuuccauuuugccauuaucuucauguuaauacuucagaucagaauacaauuaucugaagaaagugaauuuuuaguugauaggucaaaaaacggucucauccacguuccuaaagaccuaucccagaaaacaacaaucuuaaauauaucgcaaaauuauauaucugagcuuuggacuucugacaucuuaucacugucaaaacugaggauuuugauaauuucucauaauagaauccaguaucuugauaucaguguuuucaaauucaaccaggaauuggaauacuuggauuugucccacaacaaguuggugaagauuucuugccacccuacugugaaccucaagcacuuggaccugucauuuaaugcauuugaugcccugccuauaugcaaagaguuuggcaauaugucucaacuaaaauuucugggguugagcaccacacacuuagaaaaaucuagugugcugccaauugcucauuugaauaucagcaaggucuugcuggucuuaggagagacuuauggggaaaaagaagacccugagggccuucaagacuuuaacacugagagucugcacauuguguuccccacaaacaaagaauuccauuuuauuuuggaugugucagucaagacuguagcaaaucuggaacuaucuaauaucaaaugugugcuagaagauaacaaauguucuuacuuccuaaguauucuggcgaaacuucaaacaaauccaaaguuaucaaaucuuaccuuaaacaacauugaaacaacuuggaauucuuucauuaggauccuccagcugguuuggcauacaacuguaugguauuucucaauuucaaacgugaagcuacagggucagcuggacuucagagauuuugauuauucuggcacuuccuugaaggccuugucuauacaccaaguugucagcgauguguucgguuuuccgcaaaguuauaucuaugaaaucuuuucgaauaugaacaucaaaaauuucacagugucugguacacgcaugguccacaugcuuugcccauccaaaauuagcccguuccugcauuuggauuuuuccaauaaucucuuaacagacacgguuuuugaaaauugugggcaccuuacugaguuggagacacuuauuuuacaaaugaaucaauuaaaagaacuuucaaaaauagcugaaaugacuacacagaugaagucucugcaacaauuggauauuagccagaauucuguaagcuaugaugaaaagaaaggagacuguucuuggacuaaaaguuuauuaaguuuaaauaugucuucaaauauacuuacugacacuauuuucagauguuuaccucccaggaucaagguacuugaucuucacagcaauaaaauaaagagcauuccuaaacaagucguaaaacuggaagcuuugcaagaacucaauguugcuuucaauucuuuaacugaccuuccuggauguggcagcuuuagcagccuuucuguauugaucauugaucacaauucaguuucccacccaucggcugauuucuuccagagcugccagaagaugaggucaauaaaagcaggggacaauccauuccaauguaccugugagcuaggagaauuugucaaaaauauagaccaaguaucaagugaaguguuagagggcuggccugauucuuauaagugugacuacccggaaaguuauagaggaacccuacuaaaggacuuucacaugucugaauuauccugcaacauaacucugcugaucgucaccaucguugccaccaugcugguguuggcugugacugugaccucccucugcagcuacuuggaucugcccugguaucucaggauggugugccaguggacccagacccggcgcagggccaggaacauacccuuagaagaacuccaaagaaaucuccaguuucaugcauuuauuucauauagugggcacgauucuuucugggugaagaaugaauuauugccaaaccuagagaaagaagguaugcagauuugccuucaugagagaaacuuuguuccuggcaagagcauuguggaaaauaucaucaccugcauugagaagaguuacaaguccaucuuuguuuugucucccaacuuuguccagagugaauggugccauuaugaacucuacuuugcccaucacaaucucuuucaugaaggaucuaauagcuuaauccugaucuugcuggaacccauuccgcaguacuccauuccuagcaguuaucacaagcucaaaagucucauggccaggaggacuuauuuggaauggcccaaggaaaagagcaaacguggccuuuuuugggcuaacuuaagggcagccauuaauauuaagcugacagagcaagcaaagaaauag

SEQ ID NO: 9559 - RNA, 2361 nt, Artificial Sequence
  derived and/or modified sequence opt1 from TLR1__Homo_sapiens__AAI09094
augaccagcaucuuccacuucgccaucaucuucaugcugauccuccagauccgcauccagcuguccgaggagagcgaguuccugguggaccgguccaagaacggccucauccacguccccaaggaccugagccagaagaccaccauccugaacaucucccagaacuacaucagcgagcucuggaccuccgacauccugagccuguccaagcuccgcauccugaucaucagccacaaccggauccaguaccuggacaucuccguguucaaguucaaccaggagcucgaguaccuggaccugagccacaacaagcucgugaagaucuccugccacccgaccgucaaccugaagcaccuggaccucagcuucaacgccuucgacgcgcugcccaucugcaaggaguucgggaacaugucccagcugaaguuccucggccugagcaccacgcaccuggagaaguccagcgugcuccccaucgcccaccugaacaucuccaaggugcugcucguccugggggagaccuacggcgagaaggaggaccccgaggggcugcaggacuucaacaccgagagccuccacaucguguucccgaccaacaaggaguuccacuucauccuggacgugagcgucaagacgguggccaaccuggagcucuccaacaucaagugcgugcuggaggacaacaagugcagcuacuuccuguccauccucgccaagcugcagaccaaccccaagcugagcaaccucacccugaacaacaucgagaccacguggaacuccuucauccgcauccugcagcucgucuggcacaccaccgugugguacuucagcaucuccaacgugaagcugcagggccagcuggacuuccgggacuucgacuacagcggcaccucccucaaggcccugagcauccaccaggucguguccgacguguucggguucccccagagcuacaucuacgagaucuucuccaacaugaacaucaagaacuucacggucagcggcacccgcauggugcacaugcugugccccuccaagaucagcccguuccuccaccuggacuucuccaacaaccugcugaccgacaccguguucgagaacugcgggcaccucacggagcuggagacccugauccuccagaugaaccagcugaaggagcugagcaagaucgcggagaugaccacccagaugaagucccuccagcagcuggacaucagccagaacagcgucuccuacgacgagaagaagggcgacugcagcuggacgaagucccugcucagccugaacauguccagcaacauccugaccgacaccaucuuccggugccucccgccccgcaucaaggugcuggaccugcacuccaacaagaucaagagcauccccaagcaggucgugaagcucgaggcccugcaggagcugaacguggccuucaacucccucaccgaccugcccgggugcggcagcuucuccagccuguccguccucaucaucgaccacaacagcgugucccaccccagcgccgacuucuuccaguccugccagaagaugcggagcaucaaggcgggcgacaaccccuuccagugcacgugcgagcugggggaguucgugaagaacaucgaccaggucagcuccgaggugcuggagggcuggcccgacagcuacaagugcgacuacccggaguccuaccgcgggacccuccugaaggacuuccacaugagcgagcuguccugcaacaucacccuccugaucgugaccaucgucgccacgaugcuggugcucgccgugaccgucaccagccugugcuccuaccuggaccuccccugguaccugcggauggugugccaguggacccagacgcgccggcgcgcccggaacaucccccuggaggagcuccagcgcaaccugcaguuccacgccuucaucagcuacuccggccacgacagcuucugggugaagaacgagcugcuccccaaccuggagaaggagggcaugcagaucugccugcacgagcggaacuucgucccggggaaguccaucguggagaacaucaucacgugcaucgagaaguccuacaagagcaucuucgugcucagccccaacuucguccaguccgaguggugccacuacgagcuguacuucgcgcaccacaaccuguuccacgagggcagcaacucccucauccugauccugcucgagcccaucccccaguacagcaucccguccagcuaccacaagcucaagagccugauggcccgccggaccuaccuggaguggcccaaggagaaguccaagcgcgggcuguucugggccaaccugcgggccgccaucaacaucaagcucaccgagcaggcgaagaaguga

SEQ ID NO: 9560 - RNA, 2361 nt, Artificial Sequence
  derived and/or modified sequence opt2 from TLR1__Homo_sapiens__AAI09094
augaccuccaucuuccacuucgccaucaucuucaugcucauccuccagauccgcauccagcucuccgaggaguccgaguuccucgucgaccgcuccaagaacggccucauccacguccccaaggaccucucccagaagaccaccauccucaacaucucccagaacuacaucuccgagcucuggaccuccgacauccucucccucuccaagcuccgcauccucaucaucucccacaaccgcauccaguaccucgacaucuccgucuucaaguucaaccaggagcucgaguaccucgaccucucccacaacaagcucgucaagaucuccugccaccccaccgucaaccucaagcaccucgaccucuccuucaacgccuucgacgcccuccccaucugcaaggaguucggcaacaugucccagcucaaguuccucggccucuccaccacccaccucgagaaguccuccguccuccccaucgcccaccucaacaucuccaagguccuccucguccucggcgagaccuacggcgagaaggaggaccccgagggccuccaggacuucaacaccgagucccuccacaucgucuuccccaccaacaaggaguuccacuucauccucgacgucuccgucaagaccgucgccaaccucgagcucuccaacaucaagugcguccucgaggacaacaagugcuccuacuuccucuccauccucgccaagcuccagaccaaccccaagcucuccaaccucacccucaacaacaucgagaccaccuggaacuccuucauccgcauccuccagcucgucuggcacaccaccgucugguacuucuccaucuccaacgucaagcuccagggccagcucgacuuccgcgacuucgacuacuccggcaccucccucaaggcccucuccauccaccaggucgucuccgacgucuucggcuucccccaguccuacaucuacgagaucuucuccaacaugaacaucaagaacuucaccgucuccggcacccgcaugguccacaugcucugccccuccaagaucucccccuuccuccaccucgacuucuccaacaaccuccucaccgacaccgucuucgagaacugcggccaccucaccgagcucgagacccucauccuccagaugaaccagcucaaggagcucuccaagaucgccgagaugaccacccagaugaagucccuccagcagcucgacaucucccagaacuccgucuccuacgacgagaagaagggcgacugcuccuggaccaagucccuccucucccucaacauguccuccaacauccucaccgacaccaucuuccgcugccuccccccccgcaucaagguccucgaccuccacuccaacaagaucaaguccauccccaagcaggucgucaagcucgaggcccuccaggagcucaacgucgccuucaacucccucaccgaccuccccggcugcggcuccuucuccucccucuccguccucaucaucgaccacaacuccgucucccaccccuccgccgacuucuuccaguccugccagaagaugcgcuccaucaaggccggcgacaaccccuuccagugcaccugcgagcucggcgaguucgucaagaacaucgaccaggucuccuccgagguccucgagggcuggcccgacuccuacaagugcgacuaccccgaguccuaccgcggcacccuccucaaggacuuccacauguccgagcucuccugcaacaucacccuccucaucgucaccaucgucgccaccaugcucguccucgccgucaccgucaccucccucugcuccuaccucgaccuccccugguaccuccgcauggucugccaguggacccagacccgccgccgcgcccgcaacaucccccucgaggagcuccagcgcaaccuccaguuccacgccuucaucuccuacuccggccacgacuccuucugggucaagaacgagcuccuccccaaccucgagaaggagggcaugcagaucugccuccacgagcgcaacuucguccccggcaaguccaucgucgagaacaucaucaccugcaucgagaaguccuacaaguccaucuucguccucucccccaacuucguccaguccgaguggugccacuacgagcucuacuucgcccaccacaaccucuuccacgagggcuccaacucccucauccucauccuccucgagcccaucccccaguacuccauccccuccuccuaccacaagcucaagucccucauggcccgccgcaccuaccucgaguggcccaaggagaaguccaagcgcggccucuucugggccaaccuccgcgccgccaucaacaucaagcucaccgagcaggccaagaaguga

SEQ ID NO: 9561 - RNA, 2361 nt, Artificial Sequence
  derived and/or modified sequence opt3 from TLR1__Homo_sapiens__AAI09094
augaccagcaucuuccacuuugccauuauauucaugcugauccuccagauuagaauccaacuuuccgaggaaucugaguuucugguggacaggucaaagaacggcuugauucauguccccaaagauuuaagucagaagacaacuauccugaauauaagccagaacuacaucuccgaacuauggacgucugacauucucucgcugucaaaacuucggauccugauuaucagccacaaucgcauacaguauuuggauauuaguguuuucaaguuuaaccaagagcucgaauaccuggaccugucccauaauaaacucgugaagaucucuugccacccuaccguaaacuuaaagcaucuggaucuuagcuucaaugcuuuugacgcauugccaauuuguaaagaguucgggaacaugucccagcugaaguuucuaggacucucaacaacucaccuggagaaaaguagcgugcuuccgaucgcccaccugaauaucucuaaggucuugcucgugcugggugaaaccuauggcgagaaagaagaucccgagggguuacaggacuucaacacagagucccugcauauuguuuuuccuaccaauaaggaguuccacuuuauacucgaugugucagucaagacuguggcgaaccuugaacugagcaauaucaaaugcguauuggaagacaacaaguguaguuacuuccuaucuauucuggcuaaacuccagacaaauccaaagcuguccaaccuuacccugaacaauaucgagacgacuuggaacagcuucauacgaauuuugcaacucguuuggcauaccacagugugguauuuuucgaucucuaaugucaaacugcagggacaguuagauuuccgugacuuugauuacuccggcacuucacugaaggcccuaaguauccaccagguggugagcgacgucuucgguuuuccccaauccuauauuuacgaaaucuucucuaacaugaauauuaaaaacuuuaccguuagcgggacaagaauggugcacaugcucugcccuucaaagauaaguccauuccugcaucuugacuuuuccaauaacuugcugaccgauacgguauucgagaauuguggacaccucacugagcuggaaacacuuauccugcagaugaaccaguugaaggagcucagcaaaauugcagaaaugaccacucaaaugaagucucugcagcaguuagacaucucacagaauagugugagcuacgaugagaaaaagggcgacugcuccuggacaaaaucucugcuaucgcucaacaugagcuccaauauccugaccgauacgauuuuuaggugucuucccccucggauaaaggucuuggaccugcauucaaacaagaucaaaaguauuccaaagcaagugguuaaacucgaagcccugcaggaguuaaauguggcuuucaacucucugaccgaucuuccgggcugcgggagcuuuuccucauugagcguccucaucauugaccacaacucugugucccaucccagugcagauuucuuccagagcugucagaagaugcgcucuaucaaagccggagacaauccuuuucaaugcacaugugagcugggugaguucguaaagaacauagaucagguuuccucagaagugcuagaaggcuggccagacaguuauaagugcgacuaccccgagagcuauagagggacucugcucaaagauuuucacaugucggaacuguccugcaauaucacccuuuugauugucacaaucguggcuacuaugcuggucuuagccgugaccguuacaucucucuguagcuaccuggaccuuccuugguaucugaggauggugugccaguggacccagacucggcgccgagcgagaaacauuccauuggaggagcuccaaaggaaucugcaguuccacgcauuuaucucauacaguggacaugauuccuucuggguaaagaacgaacuacugcccaaucucgagaaagaaggcaugcagauaugucugcacgagcggaacuuugucccggguaagucuauuguggagaauaucauuacgugcaucgagaaaagcuauaaguccauauucguucuuucaccuaacuuugugcagagcgaauggugucauuacgaauuguacuucgcccaccacaaucuguuucaugaggggaguaacucuuuaauccucauucugcuugaacccaucccacaauauuccauuccuagcucguaccacaagcugaaaucacuaauggcucgucgcacauaucucgaguggcccaaggagaaaucuaagagaggacuguucugggccaauuugagggcagcuaucaacauaaaacugaccgaacaggccaagaaauga

SEQ ID NO: 9562 - RNA, 2361 nt, Artificial Sequence
  derived and/or modified sequence opt4 from TLR1__Homo_sapiens__AAI09094
augaccagcaucuuccacuucgccaucaucuucaugcugauccugcagaucagaauccagcugagcgaggagagcgaguuccugguggacagaagcaagaacggccugauccacgugcccaaggaccugagccagaagaccaccauccugaacaucagccagaacuacaucagcgagcuguggaccagcgacauccugagccugagcaagcugagaauccugaucaucagccacaacagaauccaguaccuggacaucagcguguucaaguucaaccaggagcuggaguaccuggaccugagccacaacaagcuggugaagaucagcugccaccccaccgugaaccugaagcaccuggaccugagcuucaacgccuucgacgcccugcccaucugcaaggaguucggcaacaugagccagcugaaguuccugggccugagcaccacccaccuggagaagagcagcgugcugcccaucgcccaccugaacaucagcaaggugcugcuggugcugggcgagaccuacggcgagaaggaggaccccgagggccugcaggacuucaacaccgagagccugcacaucguguuccccaccaacaaggaguuccacuucauccuggacgugagcgugaagaccguggccaaccuggagcugagcaacaucaagugcgugcuggaggacaacaagugcagcuacuuccugagcauccuggccaagcugcagaccaaccccaagcugagcaaccugacccugaacaacaucgagaccaccuggaacagcuucaucagaauccugcagcugguguggcacaccaccgugugguacuucagcaucagcaacgugaagcugcagggccagcuggacuucagagacuucgacuacagcggcaccagccugaaggcccugagcauccaccagguggugagcgacguguucggcuucccccagagcuacaucuacgagaucuucagcaacaugaacaucaagaacuucaccgugagcggcaccagaauggugcacaugcugugccccagcaagaucagccccuuccugcaccuggacuucagcaacaaccugcugaccgacaccguguucgagaacugcggccaccugaccgagcuggagacccugauccugcagaugaaccagcugaaggagcugagcaagaucgccgagaugaccacccagaugaagagccugcagcagcuggacaucagccagaacagcgugagcuacgacgagaagaagggcgacugcagcuggaccaagagccugcugagccugaacaugagcagcaacauccugaccgacaccaucuucagaugccugccccccagaaucaaggugcuggaccugcacagcaacaagaucaagagcauccccaagcagguggugaagcuggaggcccugcaggagcugaacguggccuucaacagccugaccgaccugcccggcugcggcagcuucagcagccugagcgugcugaucaucgaccacaacagcgugagccaccccagcgccgacuucuuccagagcugccagaagaugagaagcaucaaggccggcgacaaccccuuccagugcaccugcgagcugggcgaguucgugaagaacaucgaccaggugagcagcgaggugcuggagggcuggcccgacagcuacaagugcgacuaccccgagagcuacagaggcacccugcugaaggacuuccacaugagcgagcugagcugcaacaucacccugcugaucgugaccaucguggccaccaugcuggugcuggccgugaccgugaccagccugugcagcuaccuggaccugcccugguaccugagaauggugugccaguggacccagaccagaagaagagccagaaacaucccccuggaggagcugcagagaaaccugcaguuccacgccuucaucagcuacagcggccacgacagcuucugggugaagaacgagcugcugcccaaccuggagaaggagggcaugcagaucugccugcacgagagaaacuucgugcccggcaagagcaucguggagaacaucaucaccugcaucgagaagagcuacaagagcaucuucgugcugagccccaacuucgugcagagcgaguggugccacuacgagcuguacuucgcccaccacaaccuguuccacgagggcagcaacagccugauccugauccugcuggagcccaucccccaguacagcauccccagcagcuaccacaagcugaagagccugauggccagaagaaccuaccuggaguggcccaaggagaagagcaagagaggccuguucugggccaaccugagagccgccaucaacaucaagcugaccgagcaggccaagaaguga

SEQ ID NO: 9563 - RNA, 2361 nt, Artificial Sequence
  derived and/or modified sequence opt5 from TLR1__Homo_sapiens__AAI09094
augaccagcaucuuccacuuugccauuaucuucaugcugauucuccagauccggauucaacuguccgaggaaucugaguuucuuguggacagaagcaagaacggccugauccauguccccaaagaucucucccagaagacaacgauccugaauauuucucagaacuacaucagcgaacuuuggaccuccgacauucugucucucagcaaacugcgcauccugauuaucucccacaauagaauccaguaucucgauaucagcguuuucaaguuuaaccaagagcuggaauaccuugaccugucucauaauaaacucgugaagaucuccugccacccuacagugaaccugaagcaucuugaucugagcuucaaugcuuuugacgcccucccgauuuguaaagaguucgggaacaugucucagcugaaguuucugggacucuccaccacacaccuggagaaaagcucuguccuucccaucgcgcaccugaauauuuccaaggugcuccugguucuuggcgaaaccuauggggagaaagaagauccugagggacugcaggacuucaacacagagagccuccauaucguguuucccaccaauaaggaguuccacuuuauucuggaugucuccgugaagacgguugcuaaccuggaacucucuaauaucaaaugcgugcuggaagacaacaaguguagcuacuuccuuuccauccuggccaaacuccagaccaauccuaagcugagcaaccuuacacugaacaauauugagaccacauggaacucuuucauccggauucuccaacuggucuggcauaccacggugugguauuuuuccaucagcaaugugaaacugcagggccagcucgauuuccgcgacuuugauuacucugggacaagccugaaggcccuuuccauucaccaggucguuucugacguguucggauuuccccaaagcuauaucuacgaaaucuucuccaacaugaauauuaaaaacuuuaccgugagcggcacaagaaugguccacaugcugugcccuucuaagaucuccccguuccuccaucuggacuuuagcaauaaccugcuuaccgauaccguguucgagaauuguggccaccucacagagcuggaaacgcugauucuccagaugaaccagcugaaggagcuuucuaaaaucgcugaaaugaccacacaaaugaagucccugcagcagcucgacauuagccaaaauuccguuucuuacgaugagaaaaagggggacugcagcuggaccaaaucccugcugucucuuaacaugagcuccaauauccucacagauaccauuuuucggugucugcccccucgcaucaaggugcuggaccuccauagcaacaagaucaaaucuauucccaagcaggucgugaaacuggaagcccuucaggagcugaauguugcuuucaacucccucacggaucugccuggaugcggcagcuuuucuucccugagcgugcuuaucauugaccacaacucugucagccaucccuccgccgauuucuuccagagcugucagaagaugagaucuaucaaagcgggggacaauccguuucaaugcacaugugagcucggagaguucgugaagaacauugaucaggucuccagcgaagugcuggaaggcuggccugacuccuauaagugcgacuaccccgagucuuaucgggggacccugcucaaagauuuucacaugagcgaacuguccugcaauaucacccuucugaucguuacaauuguggccaccaugcucguccuggcugugacaguuacgucucuguguagcuaccuugaccucccuugguaucugcgcauggugugccaguggacccagacaagacggcgcgccagaaacaucccccuggaggagcuccaacggaaucugcaguuccacgcuuuuauuuccuacucuggacaugauagcuucugggucaagaacgaacuucugcccaaucucgagaaagaaggcaugcagaucugucugcacgagcgcaacuuugugccuggcaaguccauuguggagaauaucauuaccugcauugaaaagagcuauaagucuaucuucguucuguccccgaacuuuguccagagcgaguggugucauuacgaacuuuacuucgcccaccacaaucuguuucaugaggggucuaacucccucauucugauccuccuggaacccauuccucaauauagcauccccucuuccuaccacaaacuuaaaagccugauggcgagacggacauaucucgaguggccuaaggagaaauccaagagaggacuguucugggccaaucugcgcgcugccaucaacauuaaacuuaccgaacaggcuaagaaauga

SEQ ID NO: 9564 - protein, 786 aa, Artificial Sequence [sequence omitted]

SEQ ID NO: 9565 - RNA, 2361 nt, Artificial Sequence
  TLR1__Homo_sapiens__AAH89403
augacuagcaucuuccauuuugccauuaucuucauguuaauacuucagaucagaauacaauuaucugaagaaagugaauuuuuaguugauaggucaaaaaacggucucauccacguuccuaaagaccuaucccagaaaacaacaaucuuaaauauaucgcaaaauuauauaucugagcuuuggacuucugacaucuuaucacugucaaaacugaggauuuugauaauuucucauaauagaauccaguaucuugauaucaguguuuucaaauucaaccaggaauuggaauacuuggauuugucccacaacaaguuggugaagauuucuugccacccuacugugaaccucaagcacuuggaccugucauuuaaugcauuugaugcccugccuauaugcaaagaguuuggcaauaugucucaacuaaaauuucugggguugagcaccacacacuuagaaaaaucuagugugcugccaauugcucauuugaauaucagcaaggucuugcuggucuuaggagagacuuauggggaaaaagaagacccugagggccuucaagacuuuaacacugagagucugcacauuguguuccccacaaacaaagaauuccauuuuauuuuggaugugucagucaagacuguagcaaaucuggaacuaucuaauaucaaaugugugcuagaagauaacaaauguucuuacuuccuaaguauucuggcgaaacuucaaacaaauccaaaguuaucaagucuuaccuuaaacaacauugaaacaacuuggaauucuuucauuaggauccuccagcugguuuggcauacaacuguaugguauuucucaauuucaaacgugaagcuacagggucagcuggacuucagagauuuugauuauucuggcacuuccuugaaggccuugucuauacaccaaguugucagcgauguguucgguuuuccgcaaaguuauaucuaugaaaucuuuucgaauaugaacaucaaaaauuucacagugucugguacacgcaugguccacaugcuuugcccauccaaaauuagcccguuccugaauuuggauuuuuccaauaaucucuuaacagacacgguuuuugaaaauugugggcaccuuacugaguuggagacacuuauuuuacaaaugaaucaauuaaaagaacuuucaaaaauagcugaaaugacuacacagaugaagucucugcaacaauuggauauuagccagaauucuguaagcuaugaugaaaagaaaggagacuguucuuggacuaaaaguuuauuaaguuuaaauaugucuucaaauauacuuacugacacuauuuucagauguuuaccucccaggaucaagguacuugaucuucacagcaauaaaauaaagagcauuccuaaacaagucguaaaacuggaagcuuugcaagaacucaauguugcuuucaauucuuuaacugaccuuccuggauguggcagcuuuagcagccuuucuguauugaucauugaucacaauucaguuucccacccaucagcugauuucuuccagagcugccagaagaugaggucaauaaaagcaggggacaauccauuccaauguaccugugagcuaggagaauuugucaaaaauauagaccaaguaucaagugaaguguuagagggcuggccugauucuuauaagugugacuacccggaaaguuauagaggaacccuacuaaaggacuuucacaugucugaauuauccugcaacauaacucugcugaucgucaccaucguugccaccaugcugguguuggcugugacugugaccucccucugcaucuacuuggaucugcccugguaucucaggauggugugccaguggacccagacccggcgcagggccaggaacauacccuuagaagaacuccaaagaaaucuccaguuucaugcauuuauuucauauagugggcacgauucuuucugggugaagaaugaauuauugccaaaccuagagaaagaagguaugcagauuugccuucaugagagaaacuuuguuccuggcaagagcauuguggaaaauaucaucaccugcauugagaagaguuacaaguccaucuuuguuuugucucccaacuuuguccagagugaauggugccauuaugaacucuacuuugcccaucacaaucucuuucaugaaggaucuaauagcuuaauccugaucuugcuggaacccauuccgcaguacuccauuccuagcaguuaucacaagcucaaaagucucauggccaggaggacuuauuuggaauggcccaaggaaaagagcaaacguggccuuuuuugggcuaacuuaagggcagccauuaauauuaagcugacagagcaagcaaagaaauag

SEQ ID NO: 9566 - RNA, 2361 nt, Artificial Sequence
  derived and/or modified sequence opt1 from TLR1__Homo_sapiens__AAH89403
augaccagcaucuuccacuucgccaucaucuucaugcugauccuccagauccgcauccagcuguccgaggagagcgaguuccugguggaccgguccaagaacggccucauccacguccccaaggaccugagccagaagaccacgauccugaacaucucccagaacuacaucagcgagcucuggaccuccgacauccugagccuguccaagcuccgcauccugaucaucagccacaaccggauccaguaccuggacaucuccguguucaaguucaaccaggagcucgaguaccuggaccugagccacaacaagcucgugaagaucuccugccacccgaccgucaaccugaagcaccuggaccucagcuucaacgccuucgacgcgcugcccaucugcaaggaguucgggaacaugucccagcugaaguuccucggccugagcaccacgcaccuggagaaguccagcgugcuccccaucgcccaccugaacaucuccaaggugcugcucguccugggggagaccuacggcgagaaggaggaccccgaggggcugcaggacuucaacaccgagagccuccacaucguguucccgaccaacaaggaguuccacuucauccuggacgugagcgucaagacgguggccaaccuggagcucuccaacaucaagugcgugcuggaggacaacaagugcagcuacuuccuguccauccucgccaagcugcagaccaaccccaagcugagcucccucacccugaacaacaucgagaccacguggaacagcuucauccgcauccugcagcucgucuggcacaccaccgugugguacuucuccaucagcaacgugaagcugcagggccagcuggacuuccgggacuucgacuacuccggcaccagccucaaggcccuguccauccaccaggucgugagcgacguguucggguucccccaguccuacaucuacgagaucuucagcaacaugaacaucaagaacuucacggucuccggcacccgcauggugcacaugcugugccccagcaagaucuccccguuccucaaccuggacuucagcaacaaccugcugaccgacaccguguucgagaacugcgggcaccucacggagcuggagacccugauccuccagaugaaccagcugaaggagcuguccaagaucgcggagaugaccacccagaugaagucccuccagcagcuggacaucagccagaacagcgucagcuacgacgagaagaagggcgacugcuccuggaccaagagccugcucucccugaacaugagcuccaacauccugaccgacaccaucuuccggugccucccgccccgcaucaaggugcuggaccugcacagcaacaagaucaaguccauccccaagcaggucgugaagcucgaggcccugcaggagcugaacguggccuucaacagccucaccgaccugcccgggugcggcuccuucagcucccugagcguccucaucaucgaccacaacuccgugagccaccccuccgccgacuucuuccagagcugccagaagaugcggagcaucaaggcgggcgacaaccccuuccagugcacgugcgagcugggggaguucgugaagaacaucgaccaggucuccagcgaggugcuggagggcuggcccgacuccuacaagugcgacuacccggagagcuaccgcgggacccuccugaaggacuuccacauguccgagcugagcugcaacaucacccuccugaucgugaccaucgucgccacgaugcuggugcucgccgugaccgucaccucccugugcaucuaccuggaccuccccugguaccugcggauggugugccaguggacccagacgcgccggcgcgcccggaacaucccccuggaggagcuccagcgcaaccugcaguuccacgccuucaucagcuacuccggccacgacagcuucugggugaagaacgagcugcuccccaaccuggagaaggagggcaugcagaucugccugcacgagcggaacuucgucccggggaaguccaucguggagaacaucaucacgugcaucgagaaguccuacaagagcaucuucgugcucagccccaacuucguccaguccgaguggugccacuacgagcuguacuucgcgcaccacaaccuguuccacgagggcagcaacucccucauccugauccugcucgagcccaucccccaguacagcaucccguccagcuaccacaagcucaagagccugauggcccgccggaccuaccuggaguggcccaaggagaaguccaagcgcgggcuguucugggccaaccugcgggccgccaucaacaucaagcucaccgagcaggcgaagaaguga

SEQ ID NO: 9567 - RNA, 2361 nt, Artificial Sequence
  derived and/or modified sequence opt2 from TLR1__Homo_sapiens__AAH89403
augaccuccaucuuccacuucgccaucaucuucaugcucauccuccagauccgcauccagcucuccgaggaguccgaguuccucgucgaccgcuccaagaacggccucauccacguccccaaggaccucucccagaagaccaccauccucaacaucucccagaacuacaucuccgagcucuggaccuccgacauccucucccucuccaagcuccgcauccucaucaucucccacaaccgcauccaguaccucgacaucuccgucuucaaguucaaccaggagcucgaguaccucgaccucucccacaacaagcucgucaagaucuccugccaccccaccgucaaccucaagcaccucgaccucuccuucaacgccuucgacgcccuccccaucugcaaggaguucggcaacaugucccagcucaaguuccucggccucuccaccacccaccucgagaaguccuccguccuccccaucgcccaccucaacaucuccaagguccuccucguccucggcgagaccuacggcgagaaggaggaccccgagggccuccaggacuucaacaccgagucccuccacaucgucuuccccaccaacaaggaguuccacuucauccucgacgucuccgucaagaccgucgccaaccucgagcucuccaacaucaagugcguccucgaggacaacaagugcuccuacuuccucuccauccucgccaagcuccagaccaaccccaagcucuccucccucacccucaacaacaucgagaccaccuggaacuccuucauccgcauccuccagcucgucuggcacaccaccgucugguacuucuccaucuccaacgucaagcuccagggccagcucgacuuccgcgacuucgacuacuccggcaccucccucaaggcccucuccauccaccaggucgucuccgacgucuucggcuucccccaguccuacaucuacgagaucuucuccaacaugaacaucaagaacuucaccgucuccggcacccgcaugguccacaugcucugccccuccaagaucucccccuuccucaaccucgacuucuccaacaaccuccucaccgacaccgucuucgagaacugcggccaccucaccgagcucgagacccucauccuccagaugaaccagcucaaggagcucuccaagaucgccgagaugaccacccagaugaagucccuccagcagcucgacaucucccagaacuccgucuccuacgacgagaagaagggcgacugcuccuggaccaagucccuccucucccucaacauguccuccaacauccucaccgacaccaucuuccgcugccuccccccccgcaucaagguccucgaccuccacuccaacaagaucaaguccauccccaagcaggucgucaagcucgaggcccuccaggagcucaacgucgccuucaacucccucaccgaccuccccggcugcggcuccuucuccucccucuccguccucaucaucgaccacaacuccgucucccaccccuccgccgacuucuuccaguccugccagaagaugcgcuccaucaaggccggcgacaaccccuuccagugcaccugcgagcucggcgaguucgucaagaacaucgaccaggucuccuccgagguccucgagggcuggcccgacuccuacaagugcgacuaccccgaguccuaccgcggcacccuccucaaggacuuccacauguccgagcucuccugcaacaucacccuccucaucgucaccaucgucgccaccaugcucguccucgccgucaccgucaccucccucugcaucuaccucgaccuccccugguaccuccgcauggucugccaguggacccagacccgccgccgcgcccgcaacaucccccucgaggagcuccagcgcaaccuccaguuccacgccuucaucuccuacuccggccacgacuccuucugggucaagaacgagcuccuccccaaccucgagaaggagggcaugcagaucugccuccacgagcgcaacuucguccccggcaaguccaucgucgagaacaucaucaccugcaucgagaaguccuacaaguccaucuucguccucucccccaacuucguccaguccgaguggugccacuacgagcucuacuucgcccaccacaaccucuuccacgagggcuccaacucccucauccucauccuccucgagcccaucccccaguacuccauccccuccuccuaccacaagcucaagucccucauggcccgccgcaccuaccucgaguggcccaaggagaaguccaagcgcggccucuucugggccaaccuccgcgccgccaucaacaucaagcucaccgagcaggccaagaaguga

SEQ ID NO: 9568 - RNA, 2361 nt, Artificial Sequence
  derived and/or modified sequence opt3 from TLR1__Homo_sapiens__AAH89403
augaccagcaucuuccacuuugccauuauauucaugcugauccuccagauuagaauccaacuuuccgaggaaucugaguuucugguggacaggucaaagaacggcuugauucauguccccaaagauuuaagucagaagacaacuauccugaauauaagccagaacuacaucuccgaacuauggacgucugacauucucucgcugucaaaacuucggauccugauuaucagccacaaucgcauacaguauuuggauauuaguguuuucaaguuuaaccaagagcucgaauaccuggaccugucccauaauaaacucgugaagaucucuugccacccuaccguaaacuuaaagcaucuggaucuuagcuucaaugcuuuugacgcauugccaauuuguaaagaguucgggaacaugucccagcugaaguuucuaggacucucaacaacucaccuggagaaaaguagcgugcuuccgaucgcccaccugaauaucucuaaggucuugcucgugcugggugaaaccuauggcgagaaagaagaucccgagggguuacaggacuucaacacagagucccugcauauuguuuuuccuaccaauaaggaguuccacuuuauacucgaugugucagucaagacuguggcgaaccuugaacugagcaauaucaaaugcguauuggaagacaacaaguguaguuacuuccuaucuauucuggcuaaacuccagacaaauccaaagcuguccagccuuacccugaacaacaucgagacgacuuggaauagcuucauacgaauuuugcaacucguuuggcauaccacagugugguauuuuucuaucuccaacgucaaacugcagggacaguuagauuuccgugacuuugauuacucaggcacuucacugaaggcccuaagcauccaccaggugguguccgacgucuucgguuuuccccaaucuuauauuuacgaaaucuucagcaauaugaacauuaaaaauuuuaccguuucagggacaagaauggugcacaugcucugcccuaguaagauauccccauuccugaaccuugacuuuagcaauaacuugcugaccgauacgguauucgagaauuguggacaucucacugagcuggaaacacuuauccugcagaugaaccaguugaaggagcucucuaaaauugcagaaaugaccacucaaaugaagucacugcagcaguuagacaucagucagaauagcguguccuacgaugagaaaaagggcgacugcucuuggacaaaaucgcugcuaagccucaacauguccucaaauauccugaccgauacgauuuuuaggugucuucccccucggauaaaggucuuggaccugcacaguaacaagaucaaaucuauuccaaagcaagugguuaaacucgaagcccugcaggaguuaaauguggcuuucaacagccugaccgaucuuccgggcugcggguccuuuaguagcuugucuguccucaucauugaccauaacuccgugagucaccccagcgcagauuucuuccagucuugucagaagaugcgcuccaucaaagccggagacaauccuuuucaaugcacaugugagcugggugaguucguaaagaacauagaucagguuucaagugaagugcuagaaggcuggccagacagcuauaagugcgacuaccccgagucguauagagggacucugcucaaagauuuucauauguccgaacugucuugcaauaucacccuuuugauugucacaaucguggcuacuaugcuggucuuagccgugaccguuacaagccucuguauuuaccuggaccuuccuugguaucugaggauggugugccaguggacccagacucggcgccgagcgagaaacaucccauuggaggagcuccaaaggaaucugcaguuccacgcauuuauaucauacaguggacacgauuccuucuggguaaagaacgaacuacugcccaaucucgagaaagaaggcaugcagauuugucugcaugagcggaacuuugucccggguaagucuaucguggagaauauuaucacgugcauagaaaaaucguauaaguccaucuucguucuuucaccuaacuuugugcagagcgaguggugucacuacgaauuguacuucgcccaucacaaucuguuucacgaggggaguaacucuuuaauucucauccugcuugaacccauuccacaauauuccaucccuagcucguaccauaagcugaaaucacuaauggcucgucgcacauaucucgaguggcccaaggagaaaucuaagagaggacuguucugggccaauuugagggcagcuauaaacauuaaacugaccgaacaggccaagaaauga

SEQ ID NO: 9569 - RNA, 2361 nt, Artificial Sequence
  derived and/or modified sequence opt4 from TLR1__Homo_sapiens__AAH89403
augaccagcaucuuccacuucgccaucaucuucaugcugauccugcagaucagaauccagcugagcgaggagagcgaguuccugguggacagaagcaagaacggccugauccacgugcccaaggaccugagccagaagaccaccauccugaacaucagccagaacuacaucagcgagcuguggaccagcgacauccugagccugagcaagcugagaauccugaucaucagccacaacagaauccaguaccuggacaucagcguguucaaguucaaccaggagcuggaguaccuggaccugagccacaacaagcuggugaagaucagcugccaccccaccgugaaccugaagcaccuggaccugagcuucaacgccuucgacgcccugcccaucugcaaggaguucggcaacaugagccagcugaaguuccugggccugagcaccacccaccuggagaagagcagcgugcugcccaucgcccaccugaacaucagcaaggugcugcuggugcugggcgagaccuacggcgagaaggaggaccccgagggccugcaggacuucaacaccgagagccugcacaucguguuccccaccaacaaggaguuccacuucauccuggacgugagcgugaagaccguggccaaccuggagcugagcaacaucaagugcgugcuggaggacaacaagugcagcuacuuccugagcauccuggccaagcugcagaccaaccccaagcugagcagccugacccugaacaacaucgagaccaccuggaacagcuucaucagaauccugcagcugguguggcacaccaccgugugguacuucagcaucagcaacgugaagcugcagggccagcuggacuucagagacuucgacuacagcggcaccagccugaaggcccugagcauccaccagguggugagcgacguguucggcuucccccagagcuacaucuacgagaucuucagcaacaugaacaucaagaacuucaccgugagcggcaccagaauggugcacaugcugugccccagcaagaucagccccuuccugaaccuggacuucagcaacaaccugcugaccgacaccguguucgagaacugcggccaccugaccgagcuggagacccugauccugcagaugaaccagcugaaggagcugagcaagaucgccgagaugaccacccagaugaagagccugcagcagcuggacaucagccagaacagcgugagcuacgacgagaagaagggcgacugcagcuggaccaagagccugcugagccugaacaugagcagcaacauccugaccgacaccaucuucagaugccugccccccagaaucaaggugcuggaccugcacagcaacaagaucaagagcauccccaagcagguggugaagcuggaggcccugcaggagcugaacguggccuucaacagccugaccgaccugcccggcugcggcagcuucagcagccugagcgugcugaucaucgaccacaacagcgugagccaccccagcgccgacuucuuccagagcugccagaagaugagaagcaucaaggccggcgacaaccccuuccagugcaccugcgagcugggcgaguucgugaagaacaucgaccaggugagcagcgaggugcuggagggcuggcccgacagcuacaagugcgacuaccccgagagcuacagaggcacccugcugaaggacuuccacaugagcgagcugagcugcaacaucacccugcugaucgugaccaucguggccaccaugcuggugcuggccgugaccgugaccagccugugcaucuaccuggaccugcccugguaccugagaauggugugccaguggacccagaccagaagaagagccagaaacaucccccuggaggagcugcagagaaaccugcaguuccacgccuucaucagcuacagcggccacgacagcuucugggugaagaacgagcugcugcccaaccuggagaaggagggcaugcagaucugccugcacgagagaaacuucgugcccggcaagagcaucguggagaacaucaucaccugcaucgagaagagcuacaagagcaucuucgugcugagccccaacuucgugcagagcgaguggugccacuacgagcuguacuucgcccaccacaaccuguuccacgagggcagcaacagccugauccugauccugcuggagcccaucccccaguacagcauccccagcagcuaccacaagcugaagagccugauggccagaagaaccuaccuggaguggcccaaggagaagagcaagagaggccuguucugggccaaccugagagccgccaucaacaucaagcugaccgagcaggccaagaaguga

SEQ ID NO: 9570 - RNA, 2361 nt, Artificial Sequence
  derived and/or modified sequence opt5 from TLR1__Homo_sapiens__AAH89403
augaccagcaucuuccacuuugccauuaucuucaugcugauucuccagauccggauucaacuguccgaggaaucugaguuucuuguggacagaagcaagaacggccugauccauguccccaaagaucucucccagaagacaacgauccugaauauuucucagaacuacaucagcgaacuuuggaccuccgacauucugucucucagcaaacugcgcauccugauuaucucccacaauagaauccaguaucucgauauuagcguuuucaaguuuaaccaagagcuggaauaccuugaccugucucauaauaaacucgugaagaucuccugccacccuacagugaaccugaagcaucuugaucugagcuucaaugcuuuugacgcccucccgauuuguaaagaguucgggaacaugucucagcugaaguuucugggacucuccaccacacaccuggagaaaagcucuguccuucccaucgcgcaccugaauauuuccaaggugcuccugguucuuggcgaaaccuauggggagaaagaagauccugagggacugcaggacuucaacacagagagccuccauaucguguuucccaccaauaaggaguuccacuuuauucuggaugucuccgugaagacgguugcuaaccuggaacucucuaauaucaaaugcgugcuggaagacaacaaguguagcuacuuccuuuccauccuggccaaacuccagaccaauccuaagcugagcucucuuacacugaacaacauugagaccacauggaacuccuucauccggauucuccaacuggucuggcauaccacggugugguauuuuagcaucucuaaugugaaacugcagggccagcucgauuuccgcgacuuugauuacagcgggacaucccugaaggcccuuucuauucaccaggucguuagcgacguguucggauuuccccaauccuauaucuacgaaaucuucagcaauaugaacauuaaaaauuuuaccgugucuggcacaagaaugguccacaugcugugcccuuccaagaucagcccguuccucaaccuggacuuuucuaauaaccugcuuaccgauaccguguucgagaauuguggccaucucacagagcuggaaacgcugauucuccagaugaaccagcugaaggagcuuuccaaaaucgcugaaaugaccacacaaaugaaaagccugcagcagcucgacauuucccaaaauucuguuagcuacgaugagaaaaagggggacugcuccuggaccaaaucucugcugagccuuaacauguccagcaauauccucacagauaccauuuuucggugucugcccccucgcaucaaggugcuggaccuccacucuaacaagaucaaauccauucccaagcaggucgugaaacuggaagcccuucaggagcugaauguugcuuucaacagccucacggaucugccuggaugcggcucuuuuuccagccugucugugcuuaucauugaccauaacagcgucucccaccccagcgccgauuucuuccagucuugucagaagaugagauccaucaaagcgggggacaauccguuucaaugcacaugugagcucggagaguucgugaagaacauugaucaggucagcuccgaagugcuggaaggcuggccugacucuuauaagugcgacuaccccgagagcuaucgggggacccugcucaaagauuuucauauguccgaacugucuugcaauaucacccuucugaucguuacaauuguggccaccaugcucguccuggcugugacaguuacgagccuguguaucuaccuugaccucccuugguaucugcgcauggugugccaguggacccagacaagacggcgcgccagaaacauuccccuggaggagcuccaacggaaucugcaguuccacgcuuuuaucuccuacucuggacacgauagcuucugggucaagaacgaacuucugcccaaucucgagaaagaaggcaugcagauuugucugcaugagcgcaacuuugugccuggcaaguccaucguggagaauaucauuaccugcaucgaaaagagcuauaagucuauuuucguucuguccccgaacuuuguccagagcgaguggugucacuacgaacuuuacuucgcccaucacaaucuguuucacgaggggucuaacucccucauccugauucuccuggaacccaucccucaauauagcauccccucuuccuaccauaaacuuaagagccugauggcgagacggacauaucucgaguggccuaaggagaaauccaagagaggacuguucugggccaaucugcgcgcugccauuaacaucaaacuuaccgaacaggcuaagaaauga

SEQ ID NO: 9571 - protein, 786 aa, Artificial Sequence [sequence omitted]

SEQ ID NO: 9572 - RNA, 2361 nt, Artificial Sequence
  TLR1__Homo_sapiens__CAG38593
augacuagcaucuuccauuuugccauuaucuucauguuaauacuucagaucagaauacaauuaucugaagaaagugaauuuuuaguugauaggucaaaaaacggucucauccacguuccuaaagaccuaucccagaaaacaacaaucuuaaauauaucgcaaaauuauauaucugagcuuuggacuucugacaucuuaucacugucaaaacugaggauuuugauaauuucucauaauagaauccaguaucuugauaucaguguuuucaaauucaaccaggaauuggaauacuuggauuugucccacaacaaguuggugaagauuucuugccacccuacugugaaccucaagcacuuggaccugucauuuaaugcauuugaugcccugccuauaugcaaagaguuuggcaauaugucucaacuaaaauuucugggguugagcaccacacacuuagaaaaaucuagugugcugccaauugcucauuugaauaucagcaaggucuugcuggucuuaggagagacuuauggggaaaaagaagacccugggggccuucaagacuuuaacacugagagucugcacauuguguuccccacaaacaaagaauuccauuuuauuuuggaugugucagucaagacuguagcaaaucuggaacuaucuaauaucaaaugugugcuagaagauagcaaauguucuuacuuccuaaguauucuggcgaaacuucaaacaaauccaaaguuaucaagucuuaccuuaaacaacauugaaacaacuuggaauucuuucauuaggauccuccagcugguuuggcauacaacuguaugguauuccucaauuucaaacgugaagcuacagggucagcuggacuucagagauuuugauuauucuggcacuuccuugaaggccuugucuauacaccaaguugucagcgauguguucgguuuuccgcaaaguuauaucuaugaaaucuuuucgaauaugaacaucaaaaauuucacagugucugguacacgcaugguccacaugcuuugcccauccaaaauuagcccguuccugcauuuggauuuuuccaauaaucucuuaacagacacgguuuuugaaaauugugggcaccuuacugaguuggagacacuuauuuuacaaaugaaucaauuaaaagaacuuucaaaaauagcugaaaugacuacacagaugaagucucugcaacaauuggauauuagccagaauucuguaagcuaugaugaaaagaaaggagacuguucuuggacuaaaaguuuauuaaguuuaaauaugucuucaaauauacuuacugacacuauuuucagauguuuaccucccaggaucaagguacuugaucuucacagcaauaaaauaaagagcauuccuaaacaagucguaaaacuggaagcuuugcaagaacucaauguugcuuucaauucuuuaacugaccuuccuggauguggcagcuuuagcagccuuucuguauugaucauugaucacaauucaguuucccacccaucagcugauuucuuccagagcugccagaagaugaggucaauaaaagcaggggacaauccauuccaauguaccugugagcuaggagaauuugucaaaaauauagaccaaguaucaagugaaguguuagagggcuggccugauucuuauaagugugacuacccggaaaguuauagaggaacccuacuaaaggacuuucacaugucugaauuauccugcaacauaacucugcugaucgucaccaucguugccaccaugcugguguuggcugugacugugaccucccucugcaucuacuuggaucugcccugguaucucaggauggugugccaguggacccagacccggcgcagggccaggaacauacccuuagaagaacuccaaagaaaucuccaguuucaugcauuuauuucauauagugggcacgauucuuucuggaugaagaaugaauuauugccaaaccuagagaaagaagguaugcagauuugccuucaugagagaaacuuuguuccuggcaagagcauuguggaaaauaucaucaccugcauugagaagaguuacaaguccaucuuuguuuugucucccaacuuuguccagagugaauggugccauuaugaacucuacuuugcccaucacaaucucuuucaugaaggaucuaauagcuuaauccugaucuugcuggaacccauuccgcaguacuccauuccuagcaguuaucacaagcucaaaagucucauggccaggaggacuuauuuggaauggcccaaggaaaagagcaaacguggccuuuuuugggcuaacuuaagggcagccauuaauauuaagcugacagagcaagcaaagaaauag

SEQ ID NO: 9573 - RNA, 2361 nt, Artificial Sequence
  derived and/or modified sequence opt1 from TLR1__Homo_sapiens__CAG38593
augaccagcaucuuccacuucgccaucaucuucaugcugauccuccagauccgcauccagcuguccgaggagagcgaguuccugguggaccgguccaagaacggccucauccacguccccaaggaccugagccagaagaccacgauccugaacaucucccagaacuacaucagcgagcucuggaccuccgacauccugagccuguccaagcuccgcauccugaucaucagccacaaccggauccaguaccuggacaucuccguguucaaguucaaccaggagcucgaguaccuggaccugagccacaacaagcucgugaagaucuccugccacccgaccgucaaccugaagcaccuggaccucagcuucaacgccuucgacgcgcugcccaucugcaaggaguucgggaacaugucccagcugaaguuccucggccugagcaccacgcaccuggagaaguccagcgugcuccccaucgcccaccugaacaucuccaaggugcugcucguccugggggagaccuacggcgagaaggaggaccccgggggccugcaggacuucaacaccgagagccuccacaucguguucccgaccaacaaggaguuccacuucauccuggacgugagcgucaagacgguggccaaccuggagcucuccaacaucaagugcgugcuggaggacagcaagugcuccuacuuccugagcauccucgccaagcugcagaccaaccccaagcuguccagccucacccugaacaacaucgagaccacguggaacuccuucauccgcauccugcagcucgucuggcacaccaccgugugguacagcuccaucagcaacgugaagcugcagggccagcuggacuuccgggacuucgacuacuccgggaccagccucaaggcccuguccauccaccaggucgugagcgacguguucggcuucccccaguccuacaucuacgagaucuucagcaacaugaacaucaagaacuucacggucuccgggacccgcauggugcacaugcugugccccagcaagaucuccccguuccuccaccuggacuucagcaacaaccugcugaccgacaccguguucgagaacugcggccaccucacggagcuggagacccugauccuccagaugaaccagcugaaggagcugagcaagaucgcggagaugaccacccagaugaagucccuccagcagcuggacaucagccagaacuccgucagcuacgacgagaagaagggggacugcuccuggaccaagagccugcucucccugaacaugagcuccaacauccugaccgacaccaucuuccggugccucccgccccgcaucaaggugcuggaccugcacagcaacaagaucaaguccauccccaagcaggucgugaagcucgaggcccugcaggagcugaacguggccuucaacagccucaccgaccugcccggcugcggcuccuucagcucccugagcguccucaucaucgaccacaacuccgugagccaccccagcgccgacuucuuccaguccugccagaagaugcggagcaucaaggcgggggacaaccccuuccagugcacgugcgagcugggcgaguucgugaagaacaucgaccaggucuccagcgaggugcuggagggguggcccgacuccuacaagugcgacuacccggagagcuaccgcggcacccuccugaaggacuuccacauguccgagcugagcugcaacaucacccuccugaucgugaccaucgucgccacgaugcuggugcucgccgugaccgucaccucccugugcaucuaccuggaccuccccugguaccugcggauggugugccaguggacccagacgcgccggcgcgcccggaacaucccccuggaggagcuccagcgcaaccugcaguuccacgccuucaucagcuacuccggccacgacagcuucuggaugaagaacgagcugcuccccaaccuggagaaggaggggaugcagaucugccugcacgagcggaacuucgugccgggcaaguccaucgucgagaacaucaucacgugcaucgagaaguccuacaagagcaucuucgugcucagccccaacuucgugcaguccgaguggugccacuacgagcuguacuucgcgcaccacaaccuguuccacgaggggagcaacucccucauccugauccugcucgagcccaucccccaguacagcaucccgagcuccuaccacaagcucaagagccugauggcccgccggaccuaccuggaguggcccaaggagaaguccaagcgcggccuguucugggccaaccugcgggccgccaucaacaucaagcucaccgagcaggcgaagaaguga

SEQ ID NO: 9574 - RNA, 2361 nt, Artificial Sequence
  derived and/or modified sequence opt2 from TLR1__Homo_sapiens__CAG38593
augaccuccaucuuccacuucgccaucaucuucaugcucauccuccagauccgcauccagcucuccgaggaguccgaguuccucgucgaccgcuccaagaacggccucauccacguccccaaggaccucucccagaagaccaccauccucaacaucucccagaacuacaucuccgagcucuggaccuccgacauccucucccucuccaagcuccgcauccucaucaucucccacaaccgcauccaguaccucgacaucuccgucuucaaguucaaccaggagcucgaguaccucgaccucucccacaacaagcucgucaagaucuccugccaccccaccgucaaccucaagcaccucgaccucuccuucaacgccuucgacgcccuccccaucugcaaggaguucggcaacaugucccagcucaaguuccucggccucuccaccacccaccucgagaaguccuccguccuccccaucgcccaccucaacaucuccaagguccuccucguccucggcgagaccuacggcgagaaggaggaccccggcggccuccaggacuucaacaccgagucccuccacaucgucuuccccaccaacaaggaguuccacuucauccucgacgucuccgucaagaccgucgccaaccucgagcucuccaacaucaagugcguccucgaggacuccaagugcuccuacuuccucuccauccucgccaagcuccagaccaaccccaagcucuccucccucacccucaacaacaucgagaccaccuggaacuccuucauccgcauccuccagcucgucuggcacaccaccgucugguacuccuccaucuccaacgucaagcuccagggccagcucgacuuccgcgacuucgacuacuccggcaccucccucaaggcccucuccauccaccaggucgucuccgacgucuucggcuucccccaguccuacaucuacgagaucuucuccaacaugaacaucaagaacuucaccgucuccggcacccgcaugguccacaugcucugccccuccaagaucucccccuuccuccaccucgacuucuccaacaaccuccucaccgacaccgucuucgagaacugcggccaccucaccgagcucgagacccucauccuccagaugaaccagcucaaggagcucuccaagaucgccgagaugaccacccagaugaagucccuccagcagcucgacaucucccagaacuccgucuccuacgacgagaagaagggcgacugcuccuggaccaagucccuccucucccucaacauguccuccaacauccucaccgacaccaucuuccgcugccuccccccccgcaucaagguccucgaccuccacuccaacaagaucaaguccauccccaagcaggucgucaagcucgaggcccuccaggagcucaacgucgccuucaacucccucaccgaccuccccggcugcggcuccuucuccucccucuccguccucaucaucgaccacaacuccgucucccaccccuccgccgacuucuuccaguccugccagaagaugcgcuccaucaaggccggcgacaaccccuuccagugcaccugcgagcucggcgaguucgucaagaacaucgaccaggucuccuccgagguccucgagggcuggcccgacuccuacaagugcgacuaccccgaguccuaccgcggcacccuccucaaggacuuccacauguccgagcucuccugcaacaucacccuccucaucgucaccaucgucgccaccaugcucguccucgccgucaccgucaccucccucugcaucuaccucgaccuccccugguaccuccgcauggucugccaguggacccagacccgccgccgcgcccgcaacaucccccucgaggagcuccagcgcaaccuccaguuccacgccuucaucuccuacuccggccacgacuccuucuggaugaagaacgagcuccuccccaaccucgagaaggagggcaugcagaucugccuccacgagcgcaacuucguccccggcaaguccaucgucgagaacaucaucaccugcaucgagaaguccuacaaguccaucuucguccucucccccaacuucguccaguccgaguggugccacuacgagcucuacuucgcccaccacaaccucuuccacgagggcuccaacucccucauccucauccuccucgagcccaucccccaguacuccauccccuccuccuaccacaagcucaagucccucauggcccgccgcaccuaccucgaguggcccaaggagaaguccaagcgcggccucuucugggccaaccuccgcgccgccaucaacaucaagcucaccgagcaggccaagaaguga

SEQ ID NO: 9575 - RNA, 2361 nt, Artificial Sequence
  derived and/or modified sequence opt3 from TLR1__Homo_sapiens__CAG38593
augaccagcaucuuccacuuugccauuauauucaugcugauccuccagauuagaauccaacuuuccgaggaaucugaguuucugguggacaggucaaagaacggcuugauucauguccccaaagauuuaagucagaagacaacuauccugaauauaagccagaacuacaucuccgaacuauggacgucugacauucucucgcugucaaaacuucggauccugauuaucagccacaaucgcauacaguauuuggauauuaguguuuucaaguuuaaccaagagcucgaauaccuggaccugucccauaauaaacucgugaagaucucuugccacccuaccguaaacuuaaagcaucuggaucuuagcuucaaugcuuuugacgcauugccaauuuguaaagaguucgggaacaugucccagcugaaguuucuaggacucucaacaacucaccuggagaaaaguagcgugcuuccgaucgcccaccugaauaucucuaaggucuugcucgugcugggugaaaccuauggcgagaaagaagaucccgggggauuacaggacuucaacacagagucccugcauauuguuuuuccuaccaauaaggaguuccacuuuauacucgaugugucagucaagacuguggcgaaccuugaacugagcaauaucaaaugcguauuggaggacaguaaguguucuuacuuccuauccauucuggcuaaacuccagacaaacccaaagcugagcucgcuuacccugaauaacaucgaaacgacuuggaacucuuucauacgaauuuugcaacucguuuggcauaccacagugugguauuccucaaucaguaaugucaaacugcagggccaguuagauuuucgugacuucgauuacagcgguacuucccugaaggcccuaucuauccaccagguggugagcgacgucuuuggguucccccaaucauauauuuacgagaucuuuaguaacaugaauauuaaaaacuucaccguuuccggaacaagaauggugcacaugcucugcccuagcaagauaucuccauuucugcaucuugacuucucaaauaacuugcugaccgauacgguauuugaaaauuguggccaccucacugagcuggagacacuuauccugcagaugaaccaguugaaggaacucaguaaaauugcagagaugaccacucaaaugaaaagccugcagcaguuagacaucucccagaauagcgugucguacgaugaaaagaagggcgacugcagcuggacaaaaucccugcuaucacucaacaugaguucuaauauccugaccgauacgauuuucaggugucuucccccucggauaaaggucuuggaccugcauagcaacaagaucaaauccauuccaaagcaagugguuaaacucgaggcccugcaggaauuaaauguggcuuuuaacucacugaccgaucuuccggggugcggaucuuucucuuccuugaguguccucaucauugaccacaauagcgugucucaucccuccgcagacuuuuuccagucaugucagaagaugcgcaguaucaaagccggugauaacccuuuccaaugcacaugugagcugggcgaguuuguaaagaacauagaucagguuagcucggaagugcuagagggguggccagacuccuauaagugcgacuaccccgaaucuuauagaggaacucugcucaaagauuuccacaugagcgagcugucaugcaauaucacccuuuugauugucacaaucguggcuacuaugcuggucuuagccgugaccguuacaagucucuguauuuaccuggaccuuccuugguaucugaggauggugugccaguggacccagacucggcgccgagcgagaaacaucccauuggaggaacuccaaaggaaucugcaguuucacgcauucauauccuacucuggccaugauagcuuuuggaugaagaacgagcuacugcccaaucucgaaaaagaggguaugcagauuugucugcacgaacggaacuucguaccggggaaguccaucgucgagaauauuaucacgugcauagagaaaucauauaagagcaucuuugugcuuaguccuaacuucguucagucugaauggugucauuacgaguuguacuuugcccaccacaaucuguuccaugaaggauccaacagcuuaauucucauccugcuugagcccauuccacaauauucgaucccuucaucuuaccacaagcugaaaagucuaauggcucgucgcacauaucucgaauggcccaaggagaaauccaagagaggccuguuuugggccaauuugagggcagcuauaaacauuaaacugaccgagcaggccaagaaauga

SEQ ID NO: 9576 - RNA, 2361 nt, Artificial Sequence
  derived and/or modified sequence opt4 from TLR1__Homo_sapiens__CAG38593
augaccagcaucuuccacuucgccaucaucuucaugcugauccugcagaucagaauccagcugagcgaggagagcgaguuccugguggacagaagcaagaacggccugauccacgugcccaaggaccugagccagaagaccaccauccugaacaucagccagaacuacaucagcgagcuguggaccagcgacauccugagccugagcaagcugagaauccugaucaucagccacaacagaauccaguaccuggacaucagcguguucaaguucaaccaggagcuggaguaccuggaccugagccacaacaagcuggugaagaucagcugccaccccaccgugaaccugaagcaccuggaccugagcuucaacgccuucgacgcccugcccaucugcaaggaguucggcaacaugagccagcugaaguuccugggccugagcaccacccaccuggagaagagcagcgugcugcccaucgcccaccugaacaucagcaaggugcugcuggugcugggcgagaccuacggcgagaaggaggaccccggcggccugcaggacuucaacaccgagagccugcacaucguguuccccaccaacaaggaguuccacuucauccuggacgugagcgugaagaccguggccaaccuggagcugagcaacaucaagugcgugcuggaggacagcaagugcagcuacuuccugagcauccuggccaagcugcagaccaaccccaagcugagcagccugacccugaacaacaucgagaccaccuggaacagcuucaucagaauccugcagcugguguggcacaccaccgugugguacagcagcaucagcaacgugaagcugcagggccagcuggacuucagagacuucgacuacagcggcaccagccugaaggcccugagcauccaccagguggugagcgacguguucggcuucccccagagcuacaucuacgagaucuucagcaacaugaacaucaagaacuucaccgugagcggcaccagaauggugcacaugcugugccccagcaagaucagccccuuccugcaccuggacuucagcaacaaccugcugaccgacaccguguucgagaacugcggccaccugaccgagcuggagacccugauccugcagaugaaccagcugaaggagcugagcaagaucgccgagaugaccacccagaugaagagccugcagcagcuggacaucagccagaacagcgugagcuacgacgagaagaagggcgacugcagcuggaccaagagccugcugagccugaacaugagcagcaacauccugaccgacaccaucuucagaugccugccccccagaaucaaggugcuggaccugcacagcaacaagaucaagagcauccccaagcagguggugaagcuggaggcccugcaggagcugaacguggccuucaacagccugaccgaccugcccggcugcggcagcuucagcagccugagcgugcugaucaucgaccacaacagcgugagccaccccagcgccgacuucuuccagagcugccagaagaugagaagcaucaaggccggcgacaaccccuuccagugcaccugcgagcugggcgaguucgugaagaacaucgaccaggugagcagcgaggugcuggagggcuggcccgacagcuacaagugcgacuaccccgagagcuacagaggcacccugcugaaggacuuccacaugagcgagcugagcugcaacaucacccugcugaucgugaccaucguggccaccaugcuggugcuggccgugaccgugaccagccugugcaucuaccuggaccugcccugguaccugagaauggugugccaguggacccagaccagaagaagagccagaaacaucccccuggaggagcugcagagaaaccugcaguuccacgccuucaucagcuacagcggccacgacagcuucuggaugaagaacgagcugcugcccaaccuggagaaggagggcaugcagaucugccugcacgagagaaacuucgugcccggcaagagcaucguggagaacaucaucaccugcaucgagaagagcuacaagagcaucuucgugcugagccccaacuucgugcagagcgaguggugccacuacgagcuguacuucgcccaccacaaccuguuccacgagggcagcaacagccugauccugauccugcuggagcccaucccccaguacagcauccccagcagcuaccacaagcugaagagccugauggccagaagaaccuaccuggaguggcccaaggagaagagcaagagaggccuguucugggccaaccugagagccgccaucaacaucaagcugaccgagcaggccaagaaguga

SEQ ID NO: 9577 - RNA, 2361 nt, Artificial Sequence
  derived and/or modified sequence opt5 from TLR1__Homo_sapiens__CAG38593
augaccagcaucuuccacuuugccauuaucuucaugcugauucuccagauccggauucaacuguccgaggaaucugaguuucuuguggacagaagcaagaacggccugauccauguccccaaagaucucucccagaagacaacgauccugaauauuucucagaacuacaucagcgaacuuuggaccuccgacauucugucucucagcaaacugcgcauccugauuaucucccacaauagaauccaguaucucgauauuagcguuuucaaguuuaaccaagagcuggaauaccuugaccugucucauaauaaacucgugaagaucuccugccacccuacagugaaccugaagcaucuugaucugagcuucaaugcuuuugacgcccucccgauuuguaaagaguucgggaacaugucucagcugaaguuucugggacucuccaccacacaccuggagaaaagcucuguccuucccaucgcgcaccugaauauuuccaaggugcuccugguucuuggcgaaaccuauggggagaaagaagauccuggaggccugcaggacuucaacacagagagccuccauaucguguuucccaccaauaaggaguuccacuuuauucuggaugucuccgugaagacgguugcuaaccuggaacucucuaauaucaaaugcgugcuggaggacagcaaguguuccuacuuccuuagcauccuggccaaacuccagaccaacccuaagcugucuucccuuacacugaauaacauugaaaccacauggaacagcuucauccggauucuccaacuggucuggcauaccacggugugguauucuagcaucuccaaugugaaacugcaggggcagcucgauuuucgcgacuucgauuacucuggaacaagccugaaggcccuuuccauucaccaggucguuagcgacguguuuggcuucccccaaucuuauaucuacgagaucuuuuccaacaugaauauuaaaaacuucaccgugagcggcacaagaaugguccacaugcugugcccuucuaagaucuccccguuucuccaucuggacuucagcaauaaccugcuuaccgauaccguguuugaaaauugugggcaccucacagagcuggagacgcugauucuccagaugaaccagcugaaggaacuuuccaaaaucgcugagaugaccacacaaaugaagucucugcagcagcucgacauuagccaaaauuccguuucuuacgaugaaaagaagggagacugcagcuggaccaaaucccugcugagccuuaacaugucuuccaauauccucacagauaccauuuuccggugucugcccccucgcaucaaggugcuggaccuccauagcaacaagaucaaaucuauucccaagcaggucgugaaacuggaggcccuucaggaacugaauguugcuuuuaacucccucacggaucugccuggcugcgggagcuucucuagccuguccgugcuuaucauugaccacaauagcgucucucaucccuccgccgacuuuuuccagagcugucagaagaugagauccaucaaagcgggagauaacccguuccaaugcacaugugagcucggcgaguuugugaagaacauugaucaggucucuagcgaagugcuggagggguggccugacuccuauaagugcgacuaccccgaaucuuaucggggaacccugcucaaagauuuccacaugagcgagcuguccugcaauaucacccuucugaucguuacaauuguggccaccaugcucguccuggcugugacaguuacgucucuguguaucuaccuugaccucccuugguaucugcgcauggugugccaguggacccagacaagacggcgcgccagaaacauuccccuggaggaacuccaacggaaucugcaguuucacgcuuucaucagcuacuccggccaugauagcuuuuggaugaagaacgagcuucugcccaaucucgaaaaagagggcaugcagauuugucugcacgaacgcaacuucgucccugggaagucuaucguggagaauaucauuaccugcaucgagaaauccuauaagagcauuuuugugcugucuccgaacuucguucaguccgaauggugucauuacgagcuuuacuuugcccaccacaaucuguuccaugaaggaagcaacucucucauccugauucuccuggagcccaucccucaauauuccauccccagcuccuaccacaaacuuaaaagccugauggcgagacggacauaucucgaauggccuaaggagaaaucuaagagaggccuguuuugggccaaucugcgcgcugccauuaacaucaaacuuaccgagcaggcuaagaaauga

SEQ ID NO: 9578 - protein, 784 aa, Artificial Sequence
  TLR2__Homo_sapiens__O60603
MPHTLWMVWVLGVIISLSKEESSNQASLSCDRNGICKGSSGSLNSIPSGLTEAVKSLDLSNNRITYISNSDLQRCVNLQALVLTSNGINTIEEDSFSSLGSLEHLDLSYNYLSNLSSSWFKPLSSLTFLNLLGNPYKTLGETSLFSHLTKLQILRVGNMDTFTKIQRKDFAGLTFLEELEIDASDLQSYEPKSLKSIQNVSHLILHMKQHILLLEIFVDVTSSVECLELRDTDLDTFHFSELSTGETNSLIKKFTFRNVKITDESLFQVMKLLNQISGLLELEFDDCTLNGVGNFRASDNDRVIDPGKVETLTIRRLHIPRFYLFYDLSTLYSLTERVKRITVENSKVFLVPCLLSQHLKSLEYLDLSENLMVEEYLKNSACEDAWPSLQTLILRQNHLASLEKTGETLLTLKNLTNIDISKNSFHSMPETCQWPEKMKYLNLSSTRIHSVTGCIPKTLEILDVSNNNLNLFSLNLPQLKELYISRNKLMTLPDASLLPMLLVLKISRNAITTFSKEQLDSFHTLKTLEAGGNNFICSCEFLSFTQEQQALAKVLIDWPANYLCDSPSHVRGQQVQDVRLSVSECHRTALVSGMCCALFLLILLTGVLCHRFHGLWYMKMMWAWLQAKRKPRKAPSRNICYDAFVSYSERDAYWVENLMVQELENFNPPFKLCLHKRDFIPGKWIIDNIIDSIEKSHKTVFVLSENFVKSEWCKYELDFSHFRLFDENNDAAILILLEPIEKKAIPQRFCKLRKIMNTKTYLEWPMDEAQREGFWVNLRAAIKS

SEQ ID NO: 9579 - RNA, 2355 nt, Artificial Sequence
  TLR2__Homo_sapiens__AAC34377
augccacauacuuuguggaugguguggguccugggggucaucaucagccucuccaaggaagaauccuccaaucaggcuucucugucuugugaccgcaaugguaucugcaagggcagcucaggaucuuuaaacuccauucccucagggcucacagaagcuguaaaaagccuugaccuguccaacaacaggaucaccuacauuagcaacagugaccuacagaggugugugaaccuccaggcucuggugcugacauccaauggaauuaacacaauagaggaagauucuuuuucuucccugggcagucuugaacauuuagacuuauccuauaauuacuuaucuaauuuaucgucuuccugguucaagccccuuucuucuuuaacauucuuaaacuuacugggaaauccuuacaaaacccuaggggaaacaucucuuuuuucucaucucacaaaauugcaaauccugagagugggaaauauggacaccuucacuaagauucaaagaaaagauuuugcuggacuuaccuuccuugaggaacuugagauugaugcuucagaucuacagagcuaugagccaaaaaguuugaagucaauucagaauguaagucaucugauccuucauaugaagcagcauauuuuacugcuggagauuuuuguagauguuacaaguuccguggaauguuuggaacugcgagauacugauuuggacacuuuccauuuuucagaacuauccacuggugaaacaaauucauugauuaaaaaguuuacauuuagaaaugugaaaaucaccgaugaaaguuuguuucagguuaugaaacuuuugaaucagauuucuggauuguuagaauuagaguuugaugacuguacccuuaauggaguugguaauuuuagagcaucugauaaugacagaguuauagauccagguaaaguggaaacguuaacaauccggaggcugcauauuccaagguuuuacuuauuuuaugaucugagcacuuuauauucacuuacagaaagaguuaaaagaaucacaguagaaaacaguaaaguuuuucugguuccuuguuuacuuucacaacauuuaaaaucauuagaauacuuggaucucagugaaaauuugaugguugaagaauacuugaaaaauucagccugugaggaugccuggcccucucuacaaacuuuaauuuuaaggcaaaaucauuuggcaucauuggaaaaaaccggagagacuuugcucacucugaaaaacuugacuaacauugauaucaguaagaauaguuuucauucuaugccugaaacuugucaguggccagaaaagaugaaauauuugaacuuauccagcacacgaauacacaguguaacaggcugcauucccaagacacuggaaauuuuagauguuagcaacaacaaucucaauuuauuuucuuugaauuugccgcaacucaaagaacuuuauauuuccagaaauaaguugaugacucuaccagaugccucccucuuacccauguuacuaguauugaaaaucaguaggaaugcaauaacuacguuuucuaaggagcaacuugacucauuucacacacugaagacuuuggaagcugguggcaauaacuucauuugcuccugugaauuccucuccuucacucaggagcagcaagcacuggccaaagucuugauugauuggccagcaaauuaccugugugacucuccaucccaugugcguggccagcagguucaggauguccgccucucggugucggaaugucacaggacagcacuggugucuggcaugugcugugcucuguuccugcugauccugcucacggggguccugugccaccguuuccauggccugugguauaugaaaaugaugugggccuggcuccaggccaaaaggaagcccaggaaagcucccagcaggaacaucugcuaugaugcauuuguuucuuacagugagcgggaugccuacuggguggagaaccuuaugguccaggagcuggagaacuucaauccccccuucaaguugugucuucauaagcgggacuucauuccuggcaaguggaucauugacaauaucauugacuccauugaaaagagccacaaaacugucuuugugcuuucugaaaacuuugugaagagugaguggugcaaguaugaacuggacuucucccauuuccgucuuuuugaugagaacaaugaugcugccauucucauucuucuggagcccauugagaaaaaagccauuccccagcgcuucugcaagcugcggaagauaaugaacaccaagaccuaccuggaguggcccauggacgaggcucagcgggaaggauuuuggguaaaucugagagcugcgauaaaguccuag

SEQ ID NO: 9580 - RNA, 2355 nt, Artificial Sequence
  derived and/or modified sequence opt1 from TLR2__Homo_sapiens__AAC34377
augccccacacccuguggaugguguggguccucggcgugaucaucagccuguccaaggaggagagcuccaaccaggccagccuguccugcgaccgcaacgggaucugcaagggcagcuccgggagccucaacuccaucccgagcggccugaccgaggccgugaagucccuggaccucagcaacaaccggaucacguacaucuccaacagcgaccugcagcgcugcgucaaccugcaggcgcucgugcugaccuccaacgggaucaacaccaucgaggaggacagcuucuccagccugggcucccucgagcaccuggaccugagcuacaacuaccucagcaaccuguccagcuccugguucaagccccugagcucccucaccuuccugaaccugcucggcaaccccuacaagacgcugggggagaccagccuguucucccaccucaccaagcugcagauccugcgggugggcaacauggacaccuucacgaagauccagcgcaaggacuucgccgggcucaccuuccuggaggagcuggagaucgacgccagcgaccuccaguccuacgagcccaagagccugaaguccauccagaacgucagccaccugauccuccacaugaagcagcacauccugcugcucgagaucuucguggacgugaccuccagcgucgagugccuggagcugcgggacaccgaccucgacacguuccacuucuccgagcugagcaccggcgagaccaacucccugaucaagaaguucaccuuccgcaacgugaagaucacggacgagagccucuuccaggugaugaagcugcugaaccagaucuccgggcuccuggagcuggaguucgacgacugcacccucaacggcgucggcaacuuccgggccagcgacaacgaccgcgugaucgacccggggaagguggagacccugaccauccggcgccugcacaucccccgguucuaccuguucuacgaccucagcacgcuguacucccugaccgagcgcgucaagcggaucaccguggagaacagcaagguguuccucguccccugccugcugucccagcaccucaagagccuggaguaccuggaccucuccgagaaccugaugguggaggaguaccugaagaacagcgccugcgaggacgcguggcccucccuccagacccugauccugcgccagaaccaccucgccagccuggagaagacgggcgagacccugcucacccugaagaaccugaccaacaucgacaucuccaagaacagcuuccacuccaugccggagacgugccaguggcccgagaagaugaaguaccucaaccugagcuccacccggauccacagcgugaccgggugcauccccaagacccuggagauccucgacgucuccaacaacaaccugaaccuguucagccucaaccugccccagcugaaggagcucuacaucucccgcaacaagcugaugacgcugccggacgccagccuccugcccaugcugcucgugcugaagaucagccggaacgccaucaccaccuucuccaaggagcagcuggacagcuuccacacccucaagacgcuggaggcgggcggcaacaacuucaucugcuccugcgaguuccugagcuucacccaggagcagcaggcccucgccaaggugcugaucgacuggcccgccaacuaccugugcgacucccccagccacguccgcgggcagcagguccaggacgugcggcucuccgugagcgagugccaccgcaccgcccugguguccggcaugugcugcgcgcuguuccuccugauccugcucaccgggguccugugccaccgguuccacggccugugguacaugaagaugaugugggccuggcuccaggccaagcgcaagccgcgcaaggcccccagccggaacaucugcuacgacgccuucguguccuacagcgagcgcgacgcguacuggguggagaaccugaugguccaggagcuggagaacuucaacccgcccuucaagcucugccugcacaagcgggacuucauccccgggaaguggaucaucgacaacaucaucgacuccaucgagaagucccacaagaccguguucgugcugagcgagaacuucgucaagagcgaguggugcaaguacgagcucgacuucucccacuuccgccuguucgacgagaacaacgacgccgccauccugauccuccuggagcccaucgagaagaaggccaucccccagcgguucugcaagcugcgcaagaucaugaacacgaagaccuaccucgaguggcccauggacgaggcccagcgggagggcuucugggugaaccugcgcgcggccaucaagagcuga

SEQ ID NO: 9581 - RNA, 2355 nt, Artificial Sequence
  derived and/or modified sequence opt2 from TLR2__Homo_sapiens__AAC34377
augccccacacccucuggauggucuggguccucggcgucaucaucucccucuccaaggaggaguccuccaaccaggccucccucuccugcgaccgcaacggcaucugcaagggcuccuccggcucccucaacuccauccccuccggccucaccgaggccgucaagucccucgaccucuccaacaaccgcaucaccuacaucuccaacuccgaccuccagcgcugcgucaaccuccaggcccucguccucaccuccaacggcaucaacaccaucgaggaggacuccuucuccucccucggcucccucgagcaccucgaccucuccuacaacuaccucuccaaccucuccuccuccugguucaagccccucuccucccucaccuuccucaaccuccucggcaaccccuacaagacccucggcgagaccucccucuucucccaccucaccaagcuccagauccuccgcgucggcaacauggacaccuucaccaagauccagcgcaaggacuucgccggccucaccuuccucgaggagcucgagaucgacgccuccgaccuccaguccuacgagcccaagucccucaaguccauccagaacgucucccaccucauccuccacaugaagcagcacauccuccuccucgagaucuucgucgacgucaccuccuccgucgagugccucgagcuccgcgacaccgaccucgacaccuuccacuucuccgagcucuccaccggcgagaccaacucccucaucaagaaguucaccuuccgcaacgucaagaucaccgacgagucccucuuccaggucaugaagcuccucaaccagaucuccggccuccucgagcucgaguucgacgacugcacccucaacggcgucggcaacuuccgcgccuccgacaacgaccgcgucaucgaccccggcaaggucgagacccucaccauccgccgccuccacaucccccgcuucuaccucuucuacgaccucuccacccucuacucccucaccgagcgcgucaagcgcaucaccgucgagaacuccaaggucuuccucguccccugccuccucucccagcaccucaagucccucgaguaccucgaccucuccgagaaccucauggucgaggaguaccucaagaacuccgccugcgaggacgccuggcccucccuccagacccucauccuccgccagaaccaccucgccucccucgagaagaccggcgagacccuccucacccucaagaaccucaccaacaucgacaucuccaagaacuccuuccacuccaugcccgagaccugccaguggcccgagaagaugaaguaccucaaccucuccuccacccgcauccacuccgucaccggcugcauccccaagacccucgagauccucgacgucuccaacaacaaccucaaccucuucucccucaaccucccccagcucaaggagcucuacaucucccgcaacaagcucaugacccuccccgacgccucccuccuccccaugcuccucguccucaagaucucccgcaacgccaucaccaccuucuccaaggagcagcucgacuccuuccacacccucaagacccucgaggccggcggcaacaacuucaucugcuccugcgaguuccucuccuucacccaggagcagcaggcccucgccaagguccucaucgacuggcccgccaacuaccucugcgacucccccucccacguccgcggccagcagguccaggacguccgccucuccgucuccgagugccaccgcaccgcccucgucuccggcaugugcugcgcccucuuccuccucauccuccucaccggcguccucugccaccgcuuccacggccucugguacaugaagaugaugugggccuggcuccaggccaagcgcaagccccgcaaggcccccucccgcaacaucugcuacgacgccuucgucuccuacuccgagcgcgacgccuacugggucgagaaccucaugguccaggagcucgagaacuucaacccccccuucaagcucugccuccacaagcgcgacuucauccccggcaaguggaucaucgacaacaucaucgacuccaucgagaagucccacaagaccgucuucguccucuccgagaacuucgucaaguccgaguggugcaaguacgagcucgacuucucccacuuccgccucuucgacgagaacaacgacgccgccauccucauccuccucgagcccaucgagaagaaggccaucccccagcgcuucugcaagcuccgcaagaucaugaacaccaagaccuaccucgaguggcccauggacgaggcccagcgcgagggcuucugggucaaccuccgcgccgccaucaaguccuga

SEQ ID NO: 9582 - RNA, 2355 nt, Artificial Sequence
  derived and/or modified sequence opt3 from TLR2__Homo_sapiens__AAC34377
augccccacacccuguggaugguguggguccucggcguuaucauuagccuuuccaaggaggaaucuucaaaccaggccagucugagcugcgacagaaaugggauauguaaaggauccucugguucguugaacucaaucccuagcggcuuaacagaggcugugaagagucuggaucuauccaauaacaggauuacuuacaucucuaauagcgaccuccaacggugcguaaaccugcaggcacuugugcugacguccaaugggauuaacaccaucgaagaggauucauucaguagcuugggaucucucgaacaucuggaccuguccuauaauuaccucucaaacuuaagcaguucuugguuuaaaccacuguccagccuuacauucuugaaucugcuaggcaacccguauaagacucucggugagaccucgcuguuuucucaccuuacaaaacugcagauauugcgcgucgggaauauggauaccuucacuaagauccagcgaaaggacuuugccggacucacauuccuggaggaauuagagauugaugcguccgaccugcaaucauacgaacccaaaagucucaagagcauccagaacgugucccaucuuauucugcacaugaaacagcauaucuugcuacuggagauauuuguugaugugaccucuagcgucgagugucucgaacugcgugacacggaucuugacacuuuccacuuuucagagcugaguaccggcgaaacaaauuccuugauuaagaaauucacuuuuagaaacgugaagaucaccgaugagagccucuuccagguaaugaagcuguuaaaccaaauuucuggccugcuagaacucgaguuugacgacugcacacugaaugggguuggaaacuucagggcuucagauaaugaccgggugaucgauccugguaaagucgagacccuuacgauccgcagauugcacauuccaagguucuaucuguuuuacgaccucaguacucuguauagccuuacagaacgggugaagcgcauaaccguggagaacuccaaagucuuccugguucccuguuugcucucucagcaucugaagucguuagaauaccuggaucuaagcgagaaucucaugguggaagaguaccugaaaaacuccgccugcgaggacgcauggccuucacuucagacuuugauccugcgacagaaucaccucgccagucuggaaaagacaggcgagaccuuacugacgcuuaaaaacuugaccaauauugauaucucuaagaacagcuuucauuccaugccagaaacaugucaauggcccgagaagaugaaauaucucaaucugucaagcacuagaauacacucuguaaccgggugcauuccuaagacacuagaaauccuggacguguccaacaauaaccucaaucuguucagucuuaacuugccacagcugaaagaguuauacaucagcaggaacaagcucaugacucugccggaugcuucucuucugcccauguugcucguccugaaaauuucccggaaugcaaucaccacauuuucaaaggagcagcuagacaguuuccacacccugaagacucucgaagccggaggcaacaauuuuauuuguagcugcgaguuccugucguuuacgcaagaacagcaggcucuugccaaaguguugauagauuggccugcgaacuaucugugugacuccccaucucauguucguggucagcaagugcaggacguccgcuuaagcgugucagagugccacagaacagcacucguaagugggaugugcugugcccuguuccuucugauccuacucaccggaguucugugccauagguuucacggcuugugguacaugaagaugaugugggcuuggcugcaggccaaacggaagccccgaaaagcaccuucccgcaauauuuguuaugaugcuuucgugucuuacagcgagagagacgccuauugggucgaaaacuuaauggugcaggagcucgaaaauuuuaacccacccuucaagcugugccuucauaagagggauuucaucccgggcaaauggaucauugacaauauaaucgauuccauugagaagucacacaaaacugucuuugugcugagcgaaaacuucguuaagagugagugguguaaauacgaguuggacuuuucucacuuccggcucuuugaugaaaauaacgacgcggccauccugauucuacuggagccuaucgaaaagaaggcaauaccccaacgcuucugcaaacuuagaaagaucaugaauaccaaaacauaccucgaguggccaauggaugaagcucagagggagggguuuugggugaaccugcgugccgcuauuaaguccuga

SEQ ID NO: 9583 - RNA, 2355 nt, Artificial Sequence
  derived and/or modified sequence opt4 from TLR2__Homo_sapiens__AAC34377
augccccacacccuguggauggugugggugcugggcgugaucaucagccugagcaaggaggagagcagcaaccaggccagccugagcugcgacagaaacggcaucugcaagggcagcagcggcagccugaacagcauccccagcggccugaccgaggccgugaagagccuggaccugagcaacaacagaaucaccuacaucagcaacagcgaccugcagagaugcgugaaccugcaggcccuggugcugaccagcaacggcaucaacaccaucgaggaggacagcuucagcagccugggcagccuggagcaccuggaccugagcuacaacuaccugagcaaccugagcagcagcugguucaagccccugagcagccugaccuuccugaaccugcugggcaaccccuacaagacccugggcgagaccagccuguucagccaccugaccaagcugcagauccugagagugggcaacauggacaccuucaccaagauccagagaaaggacuucgccggccugaccuuccuggaggagcuggagaucgacgccagcgaccugcagagcuacgagcccaagagccugaagagcauccagaacgugagccaccugauccugcacaugaagcagcacauccugcugcuggagaucuucguggacgugaccagcagcguggagugccuggagcugagagacaccgaccuggacaccuuccacuucagcgagcugagcaccggcgagaccaacagccugaucaagaaguucaccuucagaaacgugaagaucaccgacgagagccuguuccaggugaugaagcugcugaaccagaucagcggccugcuggagcuggaguucgacgacugcacccugaacggcgugggcaacuucagagccagcgacaacgacagagugaucgaccccggcaagguggagacccugaccaucagaagacugcacauccccagauucuaccuguucuacgaccugagcacccuguacagccugaccgagagagugaagagaaucaccguggagaacagcaagguguuccuggugcccugccugcugagccagcaccugaagagccuggaguaccuggaccugagcgagaaccugaugguggaggaguaccugaagaacagcgccugcgaggacgccuggcccagccugcagacccugauccugagacagaaccaccuggccagccuggagaagaccggcgagacccugcugacccugaagaaccugaccaacaucgacaucagcaagaacagcuuccacagcaugcccgagaccugccaguggcccgagaagaugaaguaccugaaccugagcagcaccagaauccacagcgugaccggcugcauccccaagacccuggagauccuggacgugagcaacaacaaccugaaccuguucagccugaaccugccccagcugaaggagcuguacaucagcagaaacaagcugaugacccugcccgacgccagccugcugcccaugcugcuggugcugaagaucagcagaaacgccaucaccaccuucagcaaggagcagcuggacagcuuccacacccugaagacccuggaggccggcggcaacaacuucaucugcagcugcgaguuccugagcuucacccaggagcagcaggcccuggccaaggugcugaucgacuggcccgccaacuaccugugcgacagccccagccacgugagaggccagcaggugcaggacgugagacugagcgugagcgagugccacagaaccgcccuggugagcggcaugugcugcgcccuguuccugcugauccugcugaccggcgugcugugccacagauuccacggccugugguacaugaagaugaugugggccuggcugcaggccaagagaaagcccagaaaggcccccagcagaaacaucugcuacgacgccuucgugagcuacagcgagagagacgccuacuggguggagaaccugauggugcaggagcuggagaacuucaacccccccuucaagcugugccugcacaagagagacuucauccccggcaaguggaucaucgacaacaucaucgacagcaucgagaagagccacaagaccguguucgugcugagcgagaacuucgugaagagcgaguggugcaaguacgagcuggacuucagccacuucagacuguucgacgagaacaacgacgccgccauccugauccugcuggagcccaucgagaagaaggccaucccccagagauucugcaagcugagaaagaucaugaacaccaagaccuaccuggaguggcccauggacgaggcccagagagagggcuucugggugaaccugagagccgccaucaagagcuga

SEQ ID NO: 9584 - RNA, 2355 nt, Artificial Sequence
  derived and/or modified sequence opt5 from TLR2__Homo_sapiens__AAC34377
augccccacacccuguggaugguguggguccucggcguuaucauuagccuguccaaggaggaaucuagcaaccaggccucccuuucuugcgacagaaaugggaucuguaaaggaagcuccggcucucugaacagcauuccuuccgggcucacagaggcugucaagagccuggaucuuucuaauaaccggaucacguacauuuccaauagcgaccugcaacgcugcgugaaccuccaggcccuggugcugaccucuaauggaaucaacacaaucgaagaggauuccuucagcucucucggcucccuggaacaucuugaccugagcuauaauuaccucuccaaccugucuagcuccugguuuaaaccgcuuagcucucugaccuuccucaaucugcuggggaaccccuauaagacacucggagagaccucccuguuuagccaccuuacaaaacugcagauucucagagugggcaauauggauaccuucacgaagauccagcggaaggacuuugcgggccugaccuuccuugaggaacuggagauugaugcuucugaccuccaaagcuacgaaccuaaaucccugaagucuauccagaacguuagccaucugauucuccacaugaaacagcauauccugcuucuggagauuuuuguggaugucacauccagcguggagugucucgaacugcgcgacaccgaucuugacacauuccacuuuucugagcuguccaccggggaaacgaauagccucaucaagaaauucacauuuagaaacguuaagaucaccgaugagucucuguuccaggugaugaagcugcucaaccaaauuuccggacugcuugaacuggaguuugacgacugcacacucaauggcgucgggaacuuccgggccagcgauaaugaccgcgugaucgaucccggaaaaguggagacccugaccauuagacggcugcacaucccucgcuucuaucucuuuuacgaccuuuccacacuguauucucugacggaaagagucaagcggauuaccguugagaacagcaaaguguuccucgugcccugucugcuuucccagcaucugaagucucucgaauaccuggaucugagcgagaaucuuauggucgaagaguaccucaaaaacuccgccugcgaggacgcuuggccuagccugcagacacugauccuccgccagaaucaccuggccucucuugaaaagaccggcgagacacugcucacccugaaaaaccugacgaauaucgauauuuccaagaacagcuuucauucuaugccggaaacaugucaauggcccgagaagaugaaauaucuuaaucucuccagcaccagaauccacucugugaccgggugcauuccuaagacacuggaaauccuggacguuagcaacaauaaccucaaucuguucucccuuaaccugccccagcucaaagagcuguacauuagccggaacaagcugaugacccuuccugaugcuucucuccugcccaugcugcucgugcugaaaaucucccgcaaugccaucacaacguuuagcaaggagcagcuugacuccuuccacacccugaagacacucgaagcgggaggcaacaauuuuauuuguucuugcgaguuccugagcuuuacccaagaacagcaggcccuggcuaaaguccuuaucgauuggccggccaacuaucugugugacuccccuucucaugugagaggccagcaaguucaggacgugcggcucagcgucuccgagugccacagaacagcucuggugucugggaugugcugugcccucuuccugcuuauucugcucaccggaguccugugccaucgcuuucacggccugugguacaugaagaugaugugggcguggcuucaggccaaacggaagcccagaaaagcuccuagccgcaauaucuguuaugaugccuucguguccuacagcgagcgggacgcuuauuggguugaaaaccugauggugcaggagcucgaaaauuuuaacccucccuucaagcugugccuccauaagagagauuucauucccgggaaauggaucauugacaauaucaucgauucuauugagaagucccacaaaacggucuuugugcugagcgaaaacuucguuaagucugagugguguaaauacgagcuugacuuuucccacuuccgccuguuugaugaaaauaacgacgccgccauccucauucugcuggagccgaucgaaaagaaggcuauuccccaacgguucugcaaacuuagaaagaucaugaauaccaaaacauaccuggaguggccuauggaugaagcgcagcgcgagggauuuugggugaaccuccgggccgcuaucaagagcuga

SEQ ID NO: 9585 - protein, 904 aa, Artificial Sequence
  TLR3__Homo_sapiens__O15455
MRQTLPCIYFWGGLLPFGMLCASSTTKCTVSHEVADCSHLKLTQVPDDLPTNITVLNLTHNQLRRLPAANFTRYSQLTSLDVGFNTISKLEPELCQKLPMLKVLNLQHNELSQLSDKTFAFCTNLTELHLMSNSIQKIKNNPFVKQKNLITLDLSHNGLSSTKLGTQVQLENLQELLLSNNKIQALKSEELDIFANSSLKKLELSSNQIKEFSPGCFHAIGRLFGLFLNNVQLGPSLTEKLCLELANTSIRNLSLSNSQLSTTSNTTFLGLKWTNLTMLDLSYNNLNVVGNDSFAWLPQLEYFFLEYNNIQHLFSHSLHGLFNVRYLNLKRSFTKQSISLASLPKIDDFSFQWLKCLEHLNMEDNDIPGIKSNMFTGLINLKYLSLSNSFTSLRTLTNETFVSLAHSPLHILNLTKNKISKIESDAFSWLGHLEVLDLGLNEIGQELTGQEWRGLENIFEIYLSYNKYLQLTRNSFALVPSLQRLMLRRVALKNVDSSPSPFQPLRNLTILDLSNNNIANINDDMLEGLEKLEILDLQHNNLARLWKHANPGGPIYFLKGLSHLHILNLESNGFDEIPVEVFKDLFELKIIDLGLNNLNTLPASVFNNQVSLKSLNLQKNLITSVEKKVFGPAFRNLTELDMRFNPFDCTCESIAWFVNWINETHTNIPELSSHYLCNTPPHYHGFPVRLFDTSSCKDSAPFELFFMINTSILLIFIFIVLLIHFEGWRISFYWNVSVHRVLGFKEIDRQTEQFEYAAYIIHAYKDKDWVWEHFSSMEKEDQSLKFCLEERDFEAGVFELEAIVNSIKRSRKIIFVITHHLLKDPLCKRFKVHHAVQQAIEQNLDSIILVFLEEIPDYKLNHALCLRRGMFKSHCILNWPVQKERIGAFRHKLQVALGSKNSVH

SEQ ID NO: 9586 - RNA, 2715 nt, Artificial Sequence
  TLR3__Homo_sapiens__AAC34134
augagacagacuuugccuuguaucuacuuuugggggggccuuuugcccuuugggaugcugugugcauccuccaccaccaagugcacuguuagccaugaaguugcugacugcagccaccugaaguugacucagguacccgaugaucuacccacaaacauaacaguguugaaccuuacccauaaucaacucagaagauuaccagccgccaacuucacaagguauagccagcuaacuagcuuggauguaggauuuaacaccaucucaaaacuggagccagaauugugccagaaacuucccauguuaaaaguuuugaaccuccagcacaaugagcuaucucaacuuucugauaaaaccuuugccuucugcacgaauuugacugaacuccaucucauguccaacucaauccagaaaauuaaaaauaaucccuuugucaagcagaagaauuuaaucacauuagaucugucucauaauggcuugucaucuacaaaauuaggaacucagguucagcuggaaaaucuccaagagcuucuauuaucaaacaauaaaauucaagcgcuaaaaagugaagaacuggauaucuuugccaauucaucuuuaaaaaaauuagaguugucaucgaaucaaauuaaagaguuuucuccaggguguuuucacgcaauuggaagauuauuuggccucuuucugaacaauguccagcugggucccagccuuacagagaagcuauguuuggaauuagcaaacacaagcauucggaaucugucucugaguaacagccagcuguccaccaccagcaauacaacuuucuugggacuaaaguggacaaaucucacuaugcucgaucuuuccuacaacaacuuaaaugugguugguaacgauuccuuugcuuggcuuccacaacuagaauauuucuuccuagaguauaauaauauacagcauuuguuuucucacucuuugcacgggcuuuucaaugugagguaccugaauuugaaacggucuuuuacuaaacaaaguauuucccuugccucacuccccaagauugaugauuuuucuuuucaguggcuaaaauguuuggagcaccuuaacauggaagauaaugauauuccaggcauaaaaagcaauauguucacaggauugauaaaccugaaauacuuaagucuauccaacuccuuuacaaguuugcgaacuuugacaaaugaaacauuuguaucacuugcucauucucccuuacacauacucaaccuaaccaagaauaaaaucucaaaaauagagagugaugcuuucucuugguugggccaccuagaaguacuugaccugggccuuaaugaaauugggcaagaacucacaggccaggaauggagaggucuagaaaauauuuucgaaaucuaucuuuccuacaacaaguaccugcagcugacuaggaacuccuuugccuuggucccaagccuucaacgacugaugcuccgaaggguggcccuuaaaaauguggauagcucuccuucaccauuccagccucuucguaacuugaccauucuggaucuaagcaacaacaacauagccaacauaaaugaugacauguuggagggucuugagaaacuagaaauucucgauuugcagcauaacaacuuagcacggcucuggaaacacgcaaacccugguggucccauuuauuuccuaaagggucugucucaccuccacauccuuaacuuggaguccaacggcuuugacgagaucccaguugaggucuucaaggauuuauuugaacuaaagaucaucgauuuaggauugaauaauuuaaacacacuuccagcaucugucuuuaauaaucaggugucucuaaagucauugaaccuucagaagaaucucauaacauccguugagaagaagguuuucgggccagcuuucaggaaccugacugaguuagauaugcgcuuuaaucccuuugauugcacgugugaaaguauugccugguuuguuaauuggauuaacgagacccauaccaacaucccugagcugucaagccacuaccuuugcaacacuccaccucacuaucauggguucccagugagacuuuuugauacaucaucuugcaaagacagugcccccuuugaacucuuuuucaugaucaauaccaguauccuguugauuuuuaucuuuauuguacuucucauccacuuugagggcuggaggauaucuuuuuauuggaauguuucaguacaucgaguucuugguuucaaagaaauagacagacagacagaacaguuugaauaugcagcauauauaauucaugccuauaaagauaaggauugggucugggaacauuucucuucaauggaaaaggaagaccaaucucucaaauuuugucuggaagaaagggacuuugaggcggguguuuuugaacuagaagcaauuguuaacagcaucaaaagaagcagaaaaauuauuuuuguuauaacacaccaucuauuaaaagacccauuaugcaaaagauucaagguacaucaugcaguucaacaagcuauugaacaaaaucuggauuccauuauauugguuuuccuugaggagauuccagauuauaaacugaaccaugcacucuguuugcgaagaggaauguuuaaaucucacugcaucuugaacuggccaguucagaaagaacggauaggugccuuucgucauaaauugcaaguagcacuuggauccaaaaacucuguacauuaa

SEQ ID NO: 9587 - RNA, 2715 nt, Artificial Sequence
  derived and/or modified sequence opt1 from TLR3__Homo_sapiens__AAC34134
augcgccagacccugcccugcaucuacuucuggggcgggcuccugccguucggcaugcugugcgccagcuccaccacgaagugcaccgugagccacgaggucgccgacugcucccaccucaagcugacccaggugcccgacgaccugcccaccaacaucacggugcucaaccugacccacaaccagcugcggcgccuccccgcggccaacuucacccgguacagccagcugaccucccuggacgucggguucaacacgaucagcaagcucgagccggagcugugccagaagcugcccaugcucaaggugcugaaccugcagcacaacgagcucucccagcugagcgacaagaccuucgccuucugcaccaaccugaccgagcuccaccugauguccaacagcauccagaagaucaagaacaaccccuucgugaagcagaagaaccugaucacgcucgaccugucccacaacggccugagcuccaccaagcucgggacccagguccagcuggagaaccugcaggagcuccugcugagcaacaacaagauccaggcccucaaguccgaggagcuggacaucuucgccaacagcucccugaagaagcucgagcugagcuccaaccagaucaaggaguucagccccggcugcuuccacgcgaucggccgccuguucggccucuuccugaacaacgugcagcuggggccgagccucaccgagaagcugugccuggagcucgccaacacguccauccggaaccugagccuguccaacagccagcucuccaccaccagcaacaccacguuccuggggcugaaguggaccaaccugaccaugcucgaccuguccuacaacaaccugaacguggucggcaacgacagcuucgccuggcucccccagcuggaguacuucuuccuggaguacaacaacauccagcaccucuucucccacagccugcacgggcuguucaacgugcgcuaccucaaccugaagcgguccuucaccaagcagagcaucucccuggccagccuccccaagaucgacgacuucuccuuccaguggcugaagugccuggagcaccucaacauggaggacaacgacauccccggcaucaagagcaacauguucacgggccugaucaaccugaaguaccucucccugagcaacuccuucaccagccugcgcacccucaccaacgagacguucgugagccuggcgcacuccccgcugcacauccucaaccugaccaagaacaagaucagcaagaucgaguccgacgccuucagcuggcuggggcaccucgagguccuggaccugggccucaacgagaucgggcaggagcugaccggccaggaguggcggggccuggagaacaucuucgagaucuaccucuccuacaacaaguaccugcagcugacccgcaacagcuucgcccucgugcccucccugcagcggcugaugcuccgccggguggcccugaagaacgucgacagcucccccagccccuuccagccgcugcgcaaccucacgauccuggaccuguccaacaacaacaucgccaacaucaacgacgacaugcucgaggggcuggagaagcuggagauccucgaccugcagcacaacaaccuggcgcggcucuggaagcacgccaaccccggcgggcccaucuacuuccugaagggccugagccaccuccacauccugaaccuggaguccaacggguucgacgagauccccguggagguguucaaggaccucuucgagcugaagaucaucgaccugggccucaacaaccugaacacccugccggccagcgucuucaacaaccaggugucccucaagagccugaaccugcagaagaaccucaucaccuccguggagaagaaggucuucggccccgccuuccgcaaccugaccgagcuggacaugcgguucaaccccuucgacugcacgugcgagagcaucgccugguucgugaacuggaucaacgagacccacaccaacauccccgagcucagcucccacuaccugugcaacaccccgccccacuaccacggguuccccgugcgccuguucgacaccagcuccugcaaggacagcgcgcccuucgagcuguucuucaugaucaacacguccauccugcugaucuucaucuucaucguccuccugauccacuucgagggcuggcggaucagcuucuacuggaacguguccguccaccgcgugcugggguucaaggagaucgaccggcagaccgagcaguucgaguacgccgccuacaucauccacgccuacaaggacaaggacugggugugggagcacuucagcuccauggagaaggaggaccagagccucaaguucugccuggaggagcgcgacuucgaggccggcgucuucgagcuggaggcgaucgugaacuccaucaagcgcagccggaagaucaucuucgugaucacccaccaccuccugaaggacccgcugugcaagcgcuucaagguccaccacgccgugcagcaggccaucgagcagaaccucgacuccaucauccugguguuccuggaggagauccccgacuacaagcucaaccacgcccugugccugcggcgcgggauguucaagagccacugcauccucaacuggcccguccagaaggagcggaucggcgccuuccgccacaagcuccagguggcgcugggcuccaagaacagcgugcacuga

SEQ ID NO: 9588 - RNA, 2715 nt, Artificial Sequence
  derived and/or modified sequence opt2 from TLR3__Homo_sapiens__AAC34134
augcgccagacccuccccugcaucuacuucuggggcggccuccuccccuucggcaugcucugcgccuccuccaccaccaagugcaccgucucccacgaggucgccgacugcucccaccucaagcucacccagguccccgacgaccuccccaccaacaucaccguccucaaccucacccacaaccagcuccgccgccuccccgccgccaacuucacccgcuacucccagcucaccucccucgacgucggcuucaacaccaucuccaagcucgagcccgagcucugccagaagcuccccaugcucaagguccucaaccuccagcacaacgagcucucccagcucuccgacaagaccuucgccuucugcaccaaccucaccgagcuccaccucauguccaacuccauccagaagaucaagaacaaccccuucgucaagcagaagaaccucaucacccucgaccucucccacaacggccucuccuccaccaagcucggcacccagguccagcucgagaaccuccaggagcuccuccucuccaacaacaagauccaggcccucaaguccgaggagcucgacaucuucgccaacuccucccucaagaagcucgagcucuccuccaaccagaucaaggaguucucccccggcugcuuccacgccaucggccgccucuucggccucuuccucaacaacguccagcucggccccucccucaccgagaagcucugccucgagcucgccaacaccuccauccgcaaccucucccucuccaacucccagcucuccaccaccuccaacaccaccuuccucggccucaaguggaccaaccucaccaugcucgaccucuccuacaacaaccucaacgucgucggcaacgacuccuucgccuggcucccccagcucgaguacuucuuccucgaguacaacaacauccagcaccucuucucccacucccuccacggccucuucaacguccgcuaccucaaccucaagcgcuccuucaccaagcaguccaucucccucgccucccuccccaagaucgacgacuucuccuuccaguggcucaagugccucgagcaccucaacauggaggacaacgacauccccggcaucaaguccaacauguucaccggccucaucaaccucaaguaccucucccucuccaacuccuucaccucccuccgcacccucaccaacgagaccuucgucucccucgcccacuccccccuccacauccucaaccucaccaagaacaagaucuccaagaucgaguccgacgccuucuccuggcucggccaccucgagguccucgaccucggccucaacgagaucggccaggagcucaccggccaggaguggcgcggccucgagaacaucuucgagaucuaccucuccuacaacaaguaccuccagcucacccgcaacuccuucgcccucguccccucccuccagcgccucaugcuccgccgcgucgcccucaagaacgucgacuccucccccucccccuuccagccccuccgcaaccucaccauccucgaccucuccaacaacaacaucgccaacaucaacgacgacaugcucgagggccucgagaagcucgagauccucgaccuccagcacaacaaccucgcccgccucuggaagcacgccaaccccggcggccccaucuacuuccucaagggccucucccaccuccacauccucaaccucgaguccaacggcuucgacgagauccccgucgaggucuucaaggaccucuucgagcucaagaucaucgaccucggccucaacaaccucaacacccuccccgccuccgucuucaacaaccaggucucccucaagucccucaaccuccagaagaaccucaucaccuccgucgagaagaaggucuucggccccgccuuccgcaaccucaccgagcucgacaugcgcuucaaccccuucgacugcaccugcgaguccaucgccugguucgucaacuggaucaacgagacccacaccaacauccccgagcucuccucccacuaccucugcaacacccccccccacuaccacggcuuccccguccgccucuucgacaccuccuccugcaaggacuccgcccccuucgagcucuucuucaugaucaacaccuccauccuccucaucuucaucuucaucguccuccucauccacuucgagggcuggcgcaucuccuucuacuggaacgucuccguccaccgcguccucggcuucaaggagaucgaccgccagaccgagcaguucgaguacgccgccuacaucauccacgccuacaaggacaaggacugggucugggagcacuucuccuccauggagaaggaggaccagucccucaaguucugccucgaggagcgcgacuucgaggccggcgucuucgagcucgaggccaucgucaacuccaucaagcgcucccgcaagaucaucuucgucaucacccaccaccuccucaaggacccccucugcaagcgcuucaagguccaccacgccguccagcaggccaucgagcagaaccucgacuccaucauccucgucuuccucgaggagauccccgacuacaagcucaaccacgcccucugccuccgccgcggcauguucaagucccacugcauccucaacuggcccguccagaaggagcgcaucggcgccuuccgccacaagcuccaggucgcccucggcuccaagaacuccguccacuga

SEQ ID NO: 9589 - RNA, 2715 nt, Artificial Sequence
  derived and/or modified sequence opt3 from TLR3__Homo_sapiens__AAC34134
augagacagacccugcccugcaucuacuucuggggcgggcuccuuccuuuuggaaugcugugugccagcuccacaacuaagugcacggugucucacgaggucgcugacuguucacauuugaaauuaacccaaguuccagaugaccugccgacaaacauuacugugcuaaaucucacccacaaccagcugaggcggcuucccgcagccaauuucacacgcuauagucagcugaccagcuuggauguagguuuuaacacuauauccaagcucgaaccugagcugugccagaaacugccaaugcucaagguguuaaaucugcaacauaacgaacuuucucaguugucggacaaaacauucgcguuuuguaccaaucugacggagcuacaccucaugucaaacagcauccagaagauuaagaauaaccccuucgucaaacagaagaaucugaucacucuugaucugagucauaacggcuuguccucuaccaaacucgggacacaagugcagcuggaaaauuuacaggagcugcuccuuagcaacaauaagauucaggcucugaaauccgaggaauuggacaucuuugccaacucaagucuaaagaagcuggagcucagcucuaaccaaauaaaagaguucuccccuggaugcuuucacgcaaucggccgacuguucggucuuuuucugaauaacguucaguuggggccaucacucacugaaaagcuguguuuagagcuggccaauaccagcauucguaaccuaagucucucuaauucccagcugagcacaaccucgaacacgacuuuccuuggauugaaauggacaaaucugaccaugcucgaucugucuuacaacaaucuuaacguggucggcaaugacuccuuugcuuggcugccccaauuggaauauuucuuccucgaguacaacaauauccagcaccuguuuucacauaguuuacacggccuguucaacgugagauaucuaaaucucaagaggagcuuuacuaaacaguccauuucucuggcaagccuuccuaagaucgaugacuucucauuucagugguugaaaugccuggaacaucucaacauggaggauaacgacauaccagggauuaagaguaauauguucacaggacugaucaacuuaaaguaccugucccuuagcaauucuuuuaccucauugcggacgcucaccaacgaaacauucguaagucuggcccacagcccgcuacacauucugaaucucacuaaaaacaagaucuccaaaaucgagucugaugcuuuuucguggcugggucaucuugagguuuuggaccugggcuuaaaugaaauugggcaagagcucaccggacaggaauggcgcggccuggagaacauauucgaaaucuaucuuagcuacaauaaguaccugcaguugacaagaaacuccuuugcccucgugcccucacugcagaggcuaaugcugcggcgcgucgcgcucaaaaauguggacaguucuccuagcccauuccaaccccugcgaaaccuuacuauuuuggaucuguccaauaacaauaucgcaaacauaaacgacgauauguuagagggucucgagaagcuggaaauucuugaccugcagcacaauaaccuagccagacucuggaagcaugcuaauccugggggaccaaucuauuuucugaaaggcuugucacaucugcacaucuuaaaccucgagagcaauggcuucgaugaaauucccguggaggucuucaaggaccuguuugaacuuaaaaucauugaucugggguugaacaaucucaacacccugccggccucuguuuucaauaaccaggugucccuaaagagucugaaucuucagaaaaaccucauaacaagcguagagaagaagguguuuggaccugcauucaggaaucugaccgaguuggacaugcgguuuaaccccuucgauuguacuugcgaaucuaucgcuugguuugucaauuggauuaacgagacgcacacaaacaucccagaacuguccucacacuacuuauguaauaccccuccccauuaucacgguuucccagugcgucucuuugacaccaguagcugcaaagauucggcccccuucgagcuguuuuucaugaucaacacuuccauucuucugauauuuaucuucauuguuuugcucauccauuucgagggcuggcgcauuucuuuuuacuggaaugugagcguccacagagugcugggguucaaggaaaucgacaggcaaacagagcaguuugaauaugcggccuacauaauccacgcauauaaagacaaggauuggguaugggagcauuucucaaguauggaaaaagaggaccagucccuaaaguuuugccuggaggaacgggauuucgaggcuggaguuuuugaacuugaggccauugugaacucuaucaagcgaagccgcaaaauuaucuucgucauaacccaccaucuccugaaggacccuuuguguaaaagauuuaaggugcaccaugcuguccagcaagccauugaacagaauuuagauuccaucauucugguguuccucgaggagaucccagacuacaaacugaaccacgcacuuugccugaggcggggcauguuuaagucacacuguauauugaauuggccgguucagaaagaacgcaucggugccuucagacauaagcuacaaguggcucuggggagcaagaacaguguacacuga

SEQ ID NO: 9590 - RNA, 2715 nt, Artificial Sequence
  derived and/or modified sequence opt4 from TLR3__Homo_sapiens__AAC34134
augagacagacccugcccugcaucuacuucuggggcggccugcugcccuucggcaugcugugcgccagcagcaccaccaagugcaccgugagccacgagguggccgacugcagccaccugaagcugacccaggugcccgacgaccugcccaccaacaucaccgugcugaaccugacccacaaccagcugagaagacugcccgccgccaacuucaccagauacagccagcugaccagccuggacgugggcuucaacaccaucagcaagcuggagcccgagcugugccagaagcugcccaugcugaaggugcugaaccugcagcacaacgagcugagccagcugagcgacaagaccuucgccuucugcaccaaccugaccgagcugcaccugaugagcaacagcauccagaagaucaagaacaaccccuucgugaagcagaagaaccugaucacccuggaccugagccacaacggccugagcagcaccaagcugggcacccaggugcagcuggagaaccugcaggagcugcugcugagcaacaacaagauccaggcccugaagagcgaggagcuggacaucuucgccaacagcagccugaagaagcuggagcugagcagcaaccagaucaaggaguucagccccggcugcuuccacgccaucggcagacuguucggccuguuccugaacaacgugcagcugggccccagccugaccgagaagcugugccuggagcuggccaacaccagcaucagaaaccugagccugagcaacagccagcugagcaccaccagcaacaccaccuuccugggccugaaguggaccaaccugaccaugcuggaccugagcuacaacaaccugaacguggugggcaacgacagcuucgccuggcugccccagcuggaguacuucuuccuggaguacaacaacauccagcaccuguucagccacagccugcacggccuguucaacgugagauaccugaaccugaagagaagcuucaccaagcagagcaucagccuggccagccugcccaagaucgacgacuucagcuuccaguggcugaagugccuggagcaccugaacauggaggacaacgacauccccggcaucaagagcaacauguucaccggccugaucaaccugaaguaccugagccugagcaacagcuucaccagccugagaacccugaccaacgagaccuucgugagccuggcccacagcccccugcacauccugaaccugaccaagaacaagaucagcaagaucgagagcgacgccuucagcuggcugggccaccuggaggugcuggaccugggccugaacgagaucggccaggagcugaccggccaggaguggagaggccuggagaacaucuucgagaucuaccugagcuacaacaaguaccugcagcugaccagaaacagcuucgcccuggugcccagccugcagagacugaugcugagaagaguggcccugaagaacguggacagcagccccagccccuuccagccccugagaaaccugaccauccuggaccugagcaacaacaacaucgccaacaucaacgacgacaugcuggagggccuggagaagcuggagauccuggaccugcagcacaacaaccuggccagacuguggaagcacgccaaccccggcggccccaucuacuuccugaagggccugagccaccugcacauccugaaccuggagagcaacggcuucgacgagauccccguggagguguucaaggaccuguucgagcugaagaucaucgaccugggccugaacaaccugaacacccugcccgccagcguguucaacaaccaggugagccugaagagccugaaccugcagaagaaccugaucaccagcguggagaagaagguguucggccccgccuucagaaaccugaccgagcuggacaugagauucaaccccuucgacugcaccugcgagagcaucgccugguucgugaacuggaucaacgagacccacaccaacauccccgagcugagcagccacuaccugugcaacacccccccccacuaccacggcuuccccgugagacuguucgacaccagcagcugcaaggacagcgcccccuucgagcuguucuucaugaucaacaccagcauccugcugaucuucaucuucaucgugcugcugauccacuucgagggcuggagaaucagcuucuacuggaacgugagcgugcacagagugcugggcuucaaggagaucgacagacagaccgagcaguucgaguacgccgccuacaucauccacgccuacaaggacaaggacugggugugggagcacuucagcagcauggagaaggaggaccagagccugaaguucugccuggaggagagagacuucgaggccggcguguucgagcuggaggccaucgugaacagcaucaagagaagcagaaagaucaucuucgugaucacccaccaccugcugaaggacccccugugcaagagauucaaggugcaccacgccgugcagcaggccaucgagcagaaccuggacagcaucauccugguguuccuggaggagauccccgacuacaagcugaaccacgcccugugccugagaagaggcauguucaagagccacugcauccugaacuggcccgugcagaaggagagaaucggcgccuucagacacaagcugcagguggcccugggcagcaagaacagcgugcacuga

SEQ ID NO: 9591 - RNA, 2715 nt, Artificial Sequence
  derived and/or modified sequence opt5 from TLR3__Homo_sapiens__AAC34134
augagacagacccugcccugcaucuacuucuggggcgggcuccugccuuuuggaaugcuuugugccagcuccacaacgaagugcaccgugucucacgaggucgcugacuguagccaucugaaacucacacaaguuccggaugaccugcccaccaacauuacagugcuuaaucugacccacaaccagcuccggcgccugccugccgcgaauuucacaagauauucccagcugaccucucucgaugugggcuuuaacacgaucagcaagcuggaacccgagcuuugccagaaacugccuaugcucaagguccugaaucuucaacauaacgaacugucccagcucucugacaaaaccuucgcuuuuuguacaaaucugaccgagcugcaccucaugagcaacuccauucagaagaucaagaauaaccccuucgugaaacagaagaaucugauuacacuugaucugagccauaacgggcucucuuccaccaaacugggaacgcaaguucagcuugaaaaucugcaggagcuccugcugagcaacaauaagauccaggcccucaaaucugaggaacuggacaucuuugccaacuccagccuuaagaagcuggagcucucuuccaaccaaauuaaagaguucagcccuggcugcuuucacgcuaucgggcggcuguucggacuuuuucugaauaacgugcagcucggcccgucccugacagaaaagcugugucucgagcuggccaauaccucuauucgcaaccuuagccuguccaauagccagcucucuacaaccuccaacaccacauuccugggccugaaauggacgaaucuuaccaugcucgaucugagcuacaacaaucugaacgucguggggaaugacucuuuugcuuggcucccccaacuggaauauuucuuccuugaguacaacaauauccagcaccuguuuagccauucccuccacggacuguucaacguuagauaucugaaucuuaagcggucuuuuacaaaacagagcauuucccucgccagccugccuaagaucgaugacuucucuuuucaguggcugaaaugccucgaacaucugaacauggaggauaacgacauucccggcaucaaguccaauauguucaccgggcuuaucaaccugaaguaccucagccugucuaauuccuuuacaagccugcgcacccuuacgaacgaaacauucgugucccucgcgcacucuccucugcacauucugaaucucaccaaaaacaagaucagcaaaauugaguccgaugccuuuucuuggcugggacaucuugagguccuggaccucggccugaaugaaaucgggcaagagcugaccggacaggaauggagaggccuugagaacauuuucgaaaucuaucucagcuacaauaaguaccugcagcugacacggaacuccuuugcucucgugcccagccugcagcgccuuaugcugagacggguggcccucaaaaaugucgacucuuccccgagcccuuuccaaccccugcgcaaccugaccauccuugaucugucuaauaacaauauugcuaacaucaacgacgauaugcucgagggccuggagaagcucgaaauucuggaccuucagcacaauaaccuggccagacucuggaagcaugcgaauccugggggacccaucuauuuucugaaaggccugucccaccuucauauucugaaccucgagagcaauggguucgaugaaauccccguugagguguucaaggaccuguuugaacucaaaaucauugaucugggacuuaacaaucugaacacacucccugccucuguguucaauaaccaggucagccugaagucccugaaucuucagaaaaaccugaucacgagcguggagaagaagguuuuuggcccggcuuuccggaaucucaccgagcuggacaugcgcuuuaaccccuucgauuguacaugcgaaucuauugccugguuugugaauuggaucaacgagacccacacaaacauuccugaacucuccagccacuaccuguguaauacgcccccucauuaucacggguuccccgucagacuuuuugacaccuccucuugcaaagauagcgcuccguucgagcuguuuuucaugaucaacaccuccauucugcucaucuuuaucuucauugugcugcuuauccauuucgagggauggcggauuucuuuuuacuggaauguuagcgugcacagaguccugggcuucaaggaaaucgaccgccaaacagagcaguuugaauaugccgccuacauuauccacgcuuauaaagacaaggauugggugugggagcauuucuccucuauggaaaaagaggaccagagccucaaguuuugccuggaggaacgggauuucgaggcgggcgucuuugaacucgaggccaucgugaacuccauuaagagaagccgcaaaaucauuuucguuaucacccaccaucugcuuaaggacccucuguguaaacgguuuaaggugcaccaugcuguccagcaagccauugaacagaaucuggauucuaucauccucguguuccuggaggagauucccgacuacaaacuuaaccacgcccugugccucagacgcgggauguuuaagucccacuguauccugaauuggccuguucagaaagaacggauuggagcuuucagacauaagcuccaaguggcccugggcagcaagaacucuguccacuga

SEQ ID NO: 9592 - protein, 839 aa, Artificial Sequence [sequence omitted]

SEQ ID NO: 9593 - RNA, 2520 nt, Artificial Sequence
  TLR4__Homo_sapiens__AAY82270
augaugucugccucgcgccuggcugggacucugaucccagccauggccuuccucuccugcgugagaccagaaagcugggagcccugcguggaggugguuccuaauauuacuuaucaaugcauggagcugaauuucuacaaaauccccgacaaccuccccuucucaaccaagaaccuggaccugagcuuuaauccccugaggcauuuaggcagcuauagcuucuucaguuucccagaacugcaggugcuggauuuauccaggugugaaauccagacaauugaagauggggcauaucagagccuaagccaccucucuaccuuaauauugacaggaaaccccauccagaguuuagcccugggagccuuuucuggacuaucaaguuuacagaagcugguggcuguggagacaaaucuagcaucucuagagaacuuccccauuggacaucucaaaacuuugaaagaacuuaauguggcucacaaucuuauccaaucuuucaaauuaccugaguauuuuucuaaucugaccaaucuagagcacuuggaccuuuccagcaacaagauucaaaguauuuauugcacagacuugcggguucuacaucaaaugccccuacucaaucucucuuuagaccugucccugaacccuaugaacuuuauccaaccaggugcauuuaaagaaauuaggcuucauaagcugacuuuaagaaauaauuuugauaguuuaaauguaaugaaaacuuguauucaaggucuggcugguuuagaaguccaucguuugguucugggagaauuuagaaaugaaggaaacuuggaaaaguuugacaaaucugcucuagagggccuguacaauuugaccauugaagaauuccgauuagcauacuuagacuacuaccucgaugauauuauugacuuauuuaauuguuugacaaauguuucuucauuuucccuggugagugugacuauugaaaggguaaaagacuuuucuuauaauuucggauggcaacauuuagaauuaguuaacuguaaauuuggacaguuucccacauugaaacucaaaucucucaaaaggcuuacuuucacuuccaacaaaggugggaaugcuuuuucagaaguugaucuaccaagccuugaguuucuagaucucaguagaaauggcuugaguuucaaagguugcuguucucaaagugauuuugggacaaccagccuaaaguauuuagaucugagcuucaaugguguuauuaccaugaguucaaacuucuugggcuuagaacaacuagaacaucuggauuuccagcauuccaauuugaaacaaaugagugaguuuucaguauuccuaucacucagaaaccucauuuaccuugacauuucucauacucacaccagaguugcuuucaauggcaucuucaauggcuuguccagucucgaagucuugaaaauggcuggcaauucuuuccaggaaaacuuccuuccagauaucuucacagagcugagaaacuugaccuuccuggaccucucucagugucaacuggagcaguugucuccaacagcauuuaacucacucuccagucuucagguacuaaauaugagccacaacaacuucuuuucauuggauacguuuccuuauaagugucugaacucccuccagguucuugauuacagucucaaucacauaaugacuuccaaaaaacaggaacuacagcauuuuccaaguagucuagcuuucuuaaaucuuacucagaaugacuuugcuuguacuugugaacaccagaguuuccugcaauggaucaaggaccagaggcagcucuugguggaaguugaacgaauggaaugugcaacaccuucagauaagcagggcaugccugugcugaguuugaauaucaccugucagaugaauaagaccaucauuggugugucgguccucagugugcuuguaguaucuguuguagcaguucuggucuauaaguucuauuuucaccugaugcuucuugcuggcugcauaaaguaugguagaggugaaaacaucuaugaugccuuuguuaucuacucaagccaggaugaggacuggguaaggaaugagcuaguaaagaauuuagaagaaggggugccuccauuucagcucugccuucacuacagagacuuuauucccgguguggccauugcugccaacaucauccaugaagguuuccauaaaagccgaaaggugauuguuguggugucccagcacuucauccagagccgcugguguaucuuugaauaugagauugcucagaccuggcaguuucugagcagucgugcugguaucaucuucauuguccugcagaagguggagaagacccugcucaggcagcagguggagcuguaccgccuucucagcaggaacacuuaccuggagugggaggacaguguccuggggcggcacaucuucuggagacgacucagaaaagcccugcuggaugguaaaucauggaauccagaaggaacaguggguacaggaugcaauuggcaggaagcaacaucuaucuga

SEQ ID NO: 9594 - RNA, 2520 nt, Artificial Sequence
  derived and/or modified sequence opt1 from TLR4__Homo_sapiens__AAY82270
augaugagcgccucccgccuggccggcacccucauccccgcgauggccuuccugagcugcgugcggccggaguccugggagcccugcgucgagguggugcccaacaucaccuaccagugcauggagcugaacuucuacaagauccccgacaaccucccguucagcacgaagaaccuggaccuguccuucaacccccuccgccaccuggggagcuacuccuucuucagcuuccccgagcugcagguccucgaccugucccggugcgagauccagaccaucgaggacggcgccuaccagagccugucccaccucagcacccugauccugaccgggaaccccauccagucccucgcccugggcgccuucagcgggcuguccagccuccagaagcugguggcgguggagacgaaccuggccucccucgagaacuucccgaucggccaccugaagacccugaaggagcucaacgucgcccacaaccugauccagagcuucaagcugcccgaguacuucuccaaccucaccaaccuggagcaccuggaccucagcagcaacaagauccaguccaucuacugcaccgaccugcgcgugcugcaccagaugccccuccugaaccugagccucgaccugucccugaaccccaugaacuucauccagccgggcgccuucaaggagauccggcuccacaagcugacgcugcgcaacaacuucgacagccucaacgugaugaagaccugcauccaggggcuggcgggccuggagguccaccggcucgugcugggggaguuccgcaacgagggcaaccuggagaaguucgacaaguccgcccucgaggggcuguacaaccugaccaucgaggaguuccggcuggccuaccucgacuacuaccuggacgacaucaucgaccuguucaacugccucaccaacgugagcuccuucagccuggucuccgugacgaucgagcgcgugaaggacuucagcuacaacuucggcuggcagcaccuggagcucgucaacugcaaguucggccaguuccccacccugaagcugaagucccucaagcggcugaccuucaccagcaacaagggcgggaacgccuucuccgagguggaccugcccagccucgaguuccuggaccugucccgcaacgggcucagcuucaagggcugcugcucccagagcgacuucggcacgaccucccugaaguaccuggaccucagcuucaacggggugaucaccaugagcuccaacuuccugggccuggagcagcucgagcaccuggacuuccagcacagcaaccugaagcagauguccgaguucagcgucuuccucucccugcggaaccugaucuaccucgacaucagccacacccacacgcgcguggccuucaacgggaucuucaacggccuguccagccuggaggugcucaagauggcggggaacuccuuccaggagaacuuccugcccgacaucuucaccgagcugcggaaccucaccuuccuggaccugagccagugccagcucgagcagcuguccccgaccgccuucaacagccuguccagccuccagguccugaacaugucccacaacaacuucuucagccuggacacguuccccuacaagugccucaacucccuccaggugcuggacuacagccugaaccacaucaugaccagcaagaagcaggagcugcagcacuuccccuccagccuggccuuccucaaccugacccagaacgacuucgccugcacgugcgagcaccaguccuuccugcaguggaucaaggaccagcgccagcuccugguggaggucgagcggauggagugcgccacccccagcgacaagcagggcaugccggugcugucccucaacaucacgugccagaugaacaagaccaucaucggcgucagcgugcuguccgugcuggucgugagcguggucgcggugcucguguacaaguucuacuuccaccugaugcugcucgccgggugcaucaaguacggccgcggggagaacaucuacgacgccuucgucaucuacuccagccaggacgaggacugggugcggaacgagcuggugaagaaccuggaggagggcgucccgcccuuccagcucugccugcacuaccgcgacuucauccccgggguggccaucgccgcgaacaucauccacgagggcuuccacaagucccggaaggugaucgucguggugagccagcacuucauccagucccgcuggugcaucuucgaguacgagaucgcccagaccuggcaguuccugagcucccgcgccggcaucaucuucaucguccuccagaagguggagaagacccugcugcggcagcaggucgagcucuaccgccugcugagccggaacaccuaccucgagugggaggacuccgugcuggggcgccacaucuucuggcggcgccugcggaaggcccuccuggacggcaagagcuggaaccccgaggggaccgugggcaccgggugcaacuggcaggaggccacguccaucuga

SEQ ID NO: 9595 - RNA, 2520 nt, Artificial Sequence
  derived and/or modified sequence opt2 from TLR4__Homo_sapiens__AAY82270
augauguccgccucccgccucgccggcacccucauccccgccauggccuuccucuccugcguccgccccgaguccugggagcccugcgucgaggucguccccaacaucaccuaccagugcauggagcucaacuucuacaagauccccgacaaccuccccuucuccaccaagaaccucgaccucuccuucaacccccuccgccaccucggcuccuacuccuucuucuccuuccccgagcuccagguccucgaccucucccgcugcgagauccagaccaucgaggacggcgccuaccagucccucucccaccucuccacccucauccucaccggcaaccccauccagucccucgcccucggcgccuucuccggccucuccucccuccagaagcucgucgccgucgagaccaaccucgccucccucgagaacuuccccaucggccaccucaagacccucaaggagcucaacgucgcccacaaccucauccaguccuucaagcuccccgaguacuucuccaaccucaccaaccucgagcaccucgaccucuccuccaacaagauccaguccaucuacugcaccgaccuccgcguccuccaccagaugccccuccucaaccucucccucgaccucucccucaaccccaugaacuucauccagcccggcgccuucaaggagauccgccuccacaagcucacccuccgcaacaacuucgacucccucaacgucaugaagaccugcauccagggccucgccggccucgagguccaccgccucguccucggcgaguuccgcaacgagggcaaccucgagaaguucgacaaguccgcccucgagggccucuacaaccucaccaucgaggaguuccgccucgccuaccucgacuacuaccucgacgacaucaucgaccucuucaacugccucaccaacgucuccuccuucucccucgucuccgucaccaucgagcgcgucaaggacuucuccuacaacuucggcuggcagcaccucgagcucgucaacugcaaguucggccaguuccccacccucaagcucaagucccucaagcgccucaccuucaccuccaacaagggcggcaacgccuucuccgaggucgaccuccccucccucgaguuccucgaccucucccgcaacggccucuccuucaagggcugcugcucccaguccgacuucggcaccaccucccucaaguaccucgaccucuccuucaacggcgucaucaccauguccuccaacuuccucggccucgagcagcucgagcaccucgacuuccagcacuccaaccucaagcagauguccgaguucuccgucuuccucucccuccgcaaccucaucuaccucgacaucucccacacccacacccgcgucgccuucaacggcaucuucaacggccucuccucccucgagguccucaagauggccggcaacuccuuccaggagaacuuccuccccgacaucuucaccgagcuccgcaaccucaccuuccucgaccucucccagugccagcucgagcagcucucccccaccgccuucaacucccucuccucccuccagguccucaacaugucccacaacaacuucuucucccucgacaccuuccccuacaagugccucaacucccuccagguccucgacuacucccucaaccacaucaugaccuccaagaagcaggagcuccagcacuuccccuccucccucgccuuccucaaccucacccagaacgacuucgccugcaccugcgagcaccaguccuuccuccaguggaucaaggaccagcgccagcuccucgucgaggucgagcgcauggagugcgccacccccuccgacaagcagggcaugcccguccucucccucaacaucaccugccagaugaacaagaccaucaucggcgucuccguccucuccguccucgucgucuccgucgucgccguccucgucuacaaguucuacuuccaccucaugcuccucgccggcugcaucaaguacggccgcggcgagaacaucuacgacgccuucgucaucuacuccucccaggacgaggacuggguccgcaacgagcucgucaagaaccucgaggagggcgucccccccuuccagcucugccuccacuaccgcgacuucauccccggcgucgccaucgccgccaacaucauccacgagggcuuccacaagucccgcaaggucaucgucgucgucucccagcacuucauccagucccgcuggugcaucuucgaguacgagaucgcccagaccuggcaguuccucuccucccgcgccggcaucaucuucaucguccuccagaaggucgagaagacccuccuccgccagcaggucgagcucuaccgccuccucucccgcaacaccuaccucgagugggaggacuccguccucggccgccacaucuucuggcgccgccuccgcaaggcccuccucgacggcaaguccuggaaccccgagggcaccgucggcaccggcugcaacuggcaggaggccaccuccaucuga

SEQ ID NO: 9596 - RNA, 2520 nt, Artificial Sequence
  derived and/or modified sequence opt3 from TLR4__Homo_sapiens__AAY82270
augaugagcgccuccagacuggcuggcacccucauccccgcaauggccuuccuuucuugcgugaggccugagucaugggaaccaugugucgagguugugccgaacauuacauaccagugcauggaacugaauuuuuauaagauacccgacaacuugccuuucaguacuaaaaauuuagaucugagcuuuaacccacuacggcaccucggguccuacucuuucuuuucguuccccgagcugcaaguacuugaccugucacgcugugaaauccagacgauugaggauggagcguaucagagcuugagucaucucuccacccugauccugacagguaauccuauucagucucucgcuuuaggcgccuuuagcgggcuguccucacuucaaaaguugguggcagucgagacuaaccuggccagucuagaaaauuucccaaucggacaccucaaaacccugaaggagcuuaacguggcucauaaucugauacagagcuuuaaauugcccgaauacuucucuaaccucacaaaucuggagcacuuagaccuguccucaaacaagauccagagcauuuauugcaccgaucuccgaguucuucaucagaugccucuguugaaucuaagucuggaccucucucugaacccaaugaauuuuauccaaccgggcgcauucaaggagauucgucuucacaaacugacuuugagaaacaacuuugauucccucaaugugaugaagacauguauccagggucuggccggguuagaaguccacaggcuggugcuaggagaguuccggaacgaaggcaaucucgagaaauucgacaagagcgcucuggaaggccuuuacaacuugaccauagaggaguuucgccuggccuaucucgauuacuaccuggacgauauuaucgaccuuuucaauugccugacgaacguaucgucuuuuuccuugguuucagugacuauugaaagagucaaagauuucaguuauaauuuuggguggcagcaucucgagcuggugaacuguaaguucggacaguuucccaccuuaaagcugaaaagccuaaagaggcucacauucacuuccaauaaagguggcaacgcguuuucugaaguggaccugccuagccuugaguucuuggaccugucacggaaugggcucaguuuuaagggaugcuguucccaaagcgauuucggcaccacaucucugaaauacuuagaccugucauuuaacggugucaucaccaugaguagcaauuuccuuggguuggaacagcucgagcaccuggauuuccagcauuccaaccuaaagcaaaugucugaguuuucgguuuuccugagccuccgcaaucugaucuaucuugacauuucccacacgcacacucgaguggcauuuaacggaauauucaacggcuugucaagucuggaaguauuaaaaauggccggcaauucuuuucaggagaacuuccucccagauaucuuuacagaacugagaaaucuuaccuuccuggacuugagccagugccagcucgagcaacugucccccacugcuuuuaacucacuaagcucucuccaggugcugaauaugucccauaacaauuucuuuagucuggauacauucccuuacaagugucuuaacagcuugcagguccuggacuauucuuuaaaucacauuaugaccuccaagaaacaggaacuccaacauuuuccaucaagucuggccuuccuuaaccugacgcagaaugauuucgcauguaccugcgagcaccagagcuuucuacaguggaucaaggaccaaaggcagcuccugguggagguugaacggauggagugcgcuacacccucggauaaacaggggaugccgguguugucccugaacauaacuugccagaugaauaagaccauuaucggagucucuguguuaagcguacucguugugucagucguggccguccugguguacaaauucuauuuucaucuuaugcuguuggcggguuguaucaaguacggccguggggaaaacauuuacgacgccuucguuaucuauaguucccaagacgaggauugggugcgcaaugagcucguaaagaaccuggaagagggagucccucccuuucagcuaugccugcacuacagagacuucauuccaggcguggcaauagcugccaacaucauucacgaagguuuucauaaaucuaggaagguuaucguggucgugagccagcacuucauccaaucccggugguguauuuuugaguaugaaauagcucagacauggcaguuccuuucaagccgagccgggaucauuuuuaucguacuccagaaaguggagaagacucuguugcgccaacagguugagcuguacagauuacucaguaggaauaccuaucuggaaugggaggauucuguccuuggccggcauauuuucuggcgcagacugaggaaagcauugcucgacggaaaguccuggaacccugaaggcacaguggggaccggaugcaauuggcaggaggccacuagcaucuga

SEQ ID NO: 9597 - RNA, 2520 nt, Artificial Sequence
  derived and/or modified sequence opt4 from TLR4__Homo_sapiens__AAY82270
augaugagcgccagcagacuggccggcacccugauccccgccauggccuuccugagcugcgugagacccgagagcugggagcccugcguggagguggugcccaacaucaccuaccagugcauggagcugaacuucuacaagauccccgacaaccugcccuucagcaccaagaaccuggaccugagcuucaacccccugagacaccugggcagcuacagcuucuucagcuuccccgagcugcaggugcuggaccugagcagaugcgagauccagaccaucgaggacggcgccuaccagagccugagccaccugagcacccugauccugaccggcaaccccauccagagccuggcccugggcgccuucagcggccugagcagccugcagaagcugguggccguggagaccaaccuggccagccuggagaacuuccccaucggccaccugaagacccugaaggagcugaacguggcccacaaccugauccagagcuucaagcugcccgaguacuucagcaaccugaccaaccuggagcaccuggaccugagcagcaacaagauccagagcaucuacugcaccgaccugagagugcugcaccagaugccccugcugaaccugagccuggaccugagccugaaccccaugaacuucauccagcccggcgccuucaaggagaucagacugcacaagcugacccugagaaacaacuucgacagccugaacgugaugaagaccugcauccagggccuggccggccuggaggugcacagacuggugcugggcgaguucagaaacgagggcaaccuggagaaguucgacaagagcgcccuggagggccuguacaaccugaccaucgaggaguucagacuggccuaccuggacuacuaccuggacgacaucaucgaccuguucaacugccugaccaacgugagcagcuucagccuggugagcgugaccaucgagagagugaaggacuucagcuacaacuucggcuggcagcaccuggagcuggugaacugcaaguucggccaguuccccacccugaagcugaagagccugaagagacugaccuucaccagcaacaagggcggcaacgccuucagcgagguggaccugcccagccuggaguuccuggaccugagcagaaacggccugagcuucaagggcugcugcagccagagcgacuucggcaccaccagccugaaguaccuggaccugagcuucaacggcgugaucaccaugagcagcaacuuccugggccuggagcagcuggagcaccuggacuuccagcacagcaaccugaagcagaugagcgaguucagcguguuccugagccugagaaaccugaucuaccuggacaucagccacacccacaccagaguggccuucaacggcaucuucaacggccugagcagccuggaggugcugaagauggccggcaacagcuuccaggagaacuuccugcccgacaucuucaccgagcugagaaaccugaccuuccuggaccugagccagugccagcuggagcagcugagccccaccgccuucaacagccugagcagccugcaggugcugaacaugagccacaacaacuucuucagccuggacaccuuccccuacaagugccugaacagccugcaggugcuggacuacagccugaaccacaucaugaccagcaagaagcaggagcugcagcacuuccccagcagccuggccuuccugaaccugacccagaacgacuucgccugcaccugcgagcaccagagcuuccugcaguggaucaaggaccagagacagcugcugguggagguggagagaauggagugcgccacccccagcgacaagcagggcaugcccgugcugagccugaacaucaccugccagaugaacaagaccaucaucggcgugagcgugcugagcgugcugguggugagcgugguggccgugcugguguacaaguucuacuuccaccugaugcugcuggccggcugcaucaaguacggcagaggcgagaacaucuacgacgccuucgugaucuacagcagccaggacgaggacugggugagaaacgagcuggugaagaaccuggaggagggcgugccccccuuccagcugugccugcacuacagagacuucauccccggcguggccaucgccgccaacaucauccacgagggcuuccacaagagcagaaaggugaucgugguggugagccagcacuucauccagagcagauggugcaucuucgaguacgagaucgcccagaccuggcaguuccugagcagcagagccggcaucaucuucaucgugcugcagaagguggagaagacccugcugagacagcagguggagcuguacagacugcugagcagaaacaccuaccuggagugggaggacagcgugcugggcagacacaucuucuggagaagacugagaaaggcccugcuggacggcaagagcuggaaccccgagggcaccgugggcaccggcugcaacuggcaggaggccaccagcaucuga

SEQ ID NO: 9598 - RNA, 2520 nt, Artificial Sequence
  derived and/or modified sequence opt5 from TLR4__Homo_sapiens__AAY82270
augaugagcgccuccagacuggcuggcacccucauccccgccauggcguuccugucuugcgugcggccugagagcugggaaccgugugucgagguugugcccaacauuacauaccagugcauggaacuuaauuuuuauaagaucccugacaaccugcccuucuccacgaaaaaucucgaucugucuuuuaacccucuucgccaccuggggagcuacuccuucuuuucuuuccccgagcuccaagugcuggaccugagcagaugugaaauucagaccaucgaggauggagcuuaucagucccucagccaucugucuacacuuauucugaccggcaauccuauccagucccucgcccugggggccuuuagcggacuuucuucccugcaaaagcucgucgcuguggagacaaaccuggccagccuggaaaauuucccgaucggccaccucaaaacccugaaggagcuuaacguugcucauaaucugauucagucuuuuaaacuccccgaauacuucuccaaccugacaaaucuugagcaccuggaccucagcuccaacaagauccagucuauuuauugcaccgaucugcgggugcugcaucagaugccucuccugaaucuuagccuggaccucucccugaaccccaugaauuuuauccaaccuggggccuucaaggagauucgccuucacaaacugacgcucagaaacaacuuugauagccugaaugucaugaagaccuguauccagggacuggcgggccucgaagugcaccggcugguucuuggcgaguuccgcaacgaagggaaucuggagaaauucgacaagucugcccucgaaggacuguacaaccugacaauugaggaguuuagacuugcuuaucucgauuacuaccuggacgauaucaucgaccuguucaauugccucaccaacguguccagcuuuucucuggucagcgugacaauugaacgggugaaagauuucuccuauaauuuuggcuggcagcaucuugagcuggucaacuguaaguucgggcaguuucccacccucaagcugaaaucucugaagcgccuuacguucacaagcaauaaaggaggcaacgccuuuuccgaaguugaccucccgagccuggaguuccuggaccucucuagaaaugggcuguccuuuaagggaugcuguagccaaucugauuucggcaccacaucccuuaaauaccuggaccucagcuuuaacggcgugaucaccauguccucuaauuuccuggggcuggaacagcuugagcaccucgauuuccagcauagcaaccugaagcaaauguccgaguuuucuguguuccugagccuccggaaucugauuuaucuugacaucucccacacccacacacgcgucgcuuuuaacggaauuuucaacggccugagcucucucgaagugcugaaaauggccggaaauuccuuucaggagaacuuccugccugauaucuuuacggaacuuagaaaucucaccuuccuggaccugagccagugccagcucgagcaacugucucccacagcguuuaacucccuuagcucucugcagguucucaauaugagccauaacaauuucuuuucccuggauaccuucccuuacaagugucugaacagccuucaggugcuggacuauucucucaaucacaucaugacauccaagaaacaggaacugcaacauuuucccagcucccucgccuuccugaaccuuacccagaaugauuucgcuugcacgugcgagcaccagucuuuucugcaguggauuaaggaccaacggcagcuccuggucgagguggaacgcauggagugugccacacccagcgauaaacaggggaugccuguucugucccuuaacauuaccugccagaugaauaagaccaucaucggcgugucuguccugagcgugcucgucguguccguuguggcuguccugguguacaaauucuauuuucaucucaugcugcuugccggguguauuaaguacggaagaggcgaaaacaucuacgacgccuucguuaucuauucuagccaagacgaggauugggugcggaaugagcuggucaagaaccucgaagagggcgugccgcccuuucagcugugccugcacuacagagacuucauuccugggguggcuaucgcggccaacauuauccacgaaggauuucauaaaucccgcaagguuauugucguggugagccagcacuucauccaaucucggugguguauuuuugaguaugaaaucgcucagacauggcaguuccuuuccagcagagccggcaucauuuuuaucguccugcagaaaguggagaagacccuccugcgccaacagguugagcucuaccggcugcuuucuagaaauacauaucuggaaugggaggauuccgugcuggggcgccauauuuucuggcggagacuccgcaaagcccugcuugacggaaagagcuggaaccccgaaggcacggucgggaccggcugcaauuggcaggaggcuacaucuaucuga

SEQ ID NO: 9599 - protein, 839 aa, Artificial Sequence
  TLR4__Homo_sapiens__O00206
MMSASRLAGTLIPAMAFLSCVRPESWEPCVEVVPNITYQCMELNFYKIPDNLPFSTKNLDLSFNPLRHLGSYSFFSFPELQVLDLSRCEIQTIEDGAYQSLSHLSTLILTGNPIQSLALGAFSGLSSLQKLVAVETNLASLENFPIGHLKTLKELNVAHNLIQSFKLPEYFSNLTNLEHLDLSSNKIQSIYCTDLRVLHQMPLLNLSLDLSLNPMNFIQPGAFKEIRLHKLTLRNNFDSLNVMKTCIQGLAGLEVHRLVLGEFRNEGNLEKFDKSALEGLCNLTIEEFRLAYLDYYLDDIIDLFNCLTNVSSFSLVSVTIERVKDFSYNFGWQHLELVNCKFGQFPTLKLKSLKRLTFTSNKGGNAFSEVDLPSLEFLDLSRNGLSFKGCCSQSDFGTTSLKYLDLSFNGVITMSSNFLGLEQLEHLDFQHSNLKQMSEFSVFLSLRNLIYLDISHTHTRVAFNGIFNGLSSLEVLKMAGNSFQENFLPDIFTELRNLTFLDLSQCQLEQLSPTAFNSLSSLQVLNMSHNNFFSLDTFPYKCLNSLQVLDYSLNHIMTSKKQELQHFPSSLAFLNLTQNDFACTCEHQSFLQWIKDQRQLLVEVERMECATPSDKQGMPVLSLNITCQMNKTIIGVSVLSVLVVSVVAVLVYKFYFHLMLLAGCIKYGRGENIYDAFVIYSSQDEDWVRNELVKNLEEGVPPFQLCLHYRDFIPGVAIAANIIHEGFHKSRKVIVVVSQHFIQSRWCIFEYEIAQTWQFLSSRAGIIFIVLQKVEKTLLRQQVELYRLLSRNTYLEWEDSVLGRHIFWRRLRKALLDGKSWNPEGTVGTGCNWQEATSI

SEQ ID NO: 9600 - RNA, 2520 nt, Artificial Sequence
  TLR4__Homo_sapiens__AAC80227
augaugucugccucgcgccuggcugggacucugaucccagccauggccuuccucuccugcgugagaccagaaagcugggagcccugcguggaggugguuccuaauauuacuuaucaaugcauggagcugaauuucuacaaaauccccgacaaccuccccuucucaaccaagaaccuggaccugagcuuuaauccccugaggcauuuaggcagcuauagcuucuucaguuucccagaacugcaggugcuggauuuauccaggugugaaauccagacaauugaagauggggcauaucagagccuaagccaccucucuaccuuaauauugacaggaaaccccauccagaguuuagcccugggagccuuuucuggacuaucaaguuuacagaagcugguggcuguggagacaaaucuagcaucucuagagaacuuccccauuggacaucucaaaacuuugaaagaacuuaauguggcucacaaucuuauccaaucuuucaaauuaccugaguauuuuucuaaucugaccaaucuagagcacuuggaccuuuccagcaacaagauucaaaguauuuauugcacagacuugcggguucuacaucaaaugccccuacucaaucucucuuuagaccugucccugaauccuaugaacuuuauccaaccaggugcauuuaaagaaauuaggcuucauaagcugacuuuaagaaauaauuuugauaguuuaaauguaaugaaaacuuguauucaaggucuggcugguuuagaaguccaucguuugguucugggagaauuuagaaaugaaggaaacuuggaaaaguuugacaaaucugcucuagagggccugugcaauuugaccauugaagaauuccgauuagcauacuuagacuacuaccucgaugauauuauugacuuauuuaauuguuugacaaauguuucuucauuuucccuggugagugugacuauugaaaggguaaaagacuuuucuuauaauuucggauggcaacauuuagaauuaguuaacuguaaauuuggacaguuucccacauugaaacucaaaucucucaaaaggcuuacuuucacuuccaacaaaggugggaaugcuuuuucagaaguugaucuaccaagccuugaguuucuagaucucaguagaaauggcuugaguuucaaagguugcuguucucaaagugauuuugggacaaccagccuaaaguauuuagaucugagcuucaaugguguuauuaccaugaguucaaacuucuugggcuuagaacaacuagaacaucuggauuuccagcauuccaauuugaaacaaaugagugaguuuucaguauuccuaucacucagaaaccucauuuaccuugacauuucucauacucacaccagaguugcuuucaauggcaucuucaauggcuuguccagucucgaagucuugaaaauggcuggcaauucuuuccaggaaaacuuccuuccagauaucuucacagagcugagaaacuugaccuuccuggaccucucucagugucaacuggagcaguugucuccaacagcauuuaacucacucuccagucuucagguacuaaauaugagccacaacaacuucuuuucauuggauacguuuccuuauaagugucugaacucccuccagguucuugauuacagucucaaucacauaaugacuuccaaaaaacaggaacuacagcauuuuccaaguagucuagcuuucuuaaaucuuacucagaaugacuuugcuuguacuugugaacaccagaguuuccugcaauggaucaaggaccagaggcagcucuugguggaaguugaacgaauggaaugugcaacaccuucagauaagcagggcaugccugugcugaguuugaauaucaccugucagaugaauaagaccaucauuggugugucgguccucagugugcuuguaguaucuguuguagcaguucuggucuauaaguucuauuuucaccugaugcuucuugcuggcugcauaaaguaugguagaggugaaaacaucuaugaugccuuuguuaucuacucaagccaggaugaggacuggguaaggaaugagcuaguaaagaauuuagaagaaggggugccuccauuucagcucugccuucacuacagagacuuuauucccgguguggccauugcugccaacaucauccaugaagguuuccauaaaagccgaaaggugauuguuguggugucccagcacuucauccagagccgcugguguaucuuugaauaugagauugcucagaccuggcaguuucugagcagucgugcugguaucaucuucauuguccugcagaagguggagaagacccugcucaggcagcagguggagcuguaccgccuucucagcaggaacacuuaccuggagugggaggacaguguccuggggcggcacaucuucuggagacgacucagaaaagcccugcuggaugguaaaucauggaauccagaaggaacaguggguacaggaugcaauuggcaggaagcaacaucuaucuga

SEQ ID NO: 9601 - RNA, 2520 nt, Artificial Sequence
  derived and/or modified sequence opt1 from TLR4__Homo_sapiens__AAC80227
augaugagcgccucccgccuggccggcacccucauccccgcgauggccuuccugagcugcgugcggccggaguccugggagcccugcgucgagguggugcccaacaucaccuaccagugcauggagcugaacuucuacaagauccccgacaaccucccguucagcacgaagaaccuggaccuguccuucaacccccuccgccaccuggggagcuacuccuucuucagcuuccccgagcugcagguccucgaccugucccggugcgagauccagaccaucgaggacggcgccuaccagagccugucccaccucagcacccugauccugaccgggaaccccauccagucccucgcccugggcgccuucagcgggcuguccagccuccagaagcugguggcgguggagacgaaccuggccucccucgagaacuucccgaucggccaccugaagacccugaaggagcucaacgucgcccacaaccugauccagagcuucaagcugcccgaguacuucuccaaccucaccaaccuggagcaccuggaccucagcagcaacaagauccaguccaucuacugcaccgaccugcgcgugcugcaccagaugccccuccugaaccugagccucgaccugucccugaaccccaugaacuucauccagccgggcgccuucaaggagauccggcuccacaagcugacgcugcgcaacaacuucgacagccucaacgugaugaagaccugcauccaggggcuggcgggccuggagguccaccggcucgugcugggggaguuccgcaacgagggcaaccuggagaaguucgacaaguccgcccucgaggggcugugcaaccugaccaucgaggaguuccggcuggccuaccucgacuacuaccuggacgacaucaucgaccuguucaacugccucaccaacgugagcuccuucagccuggucuccgugacgaucgagcgcgugaaggacuucagcuacaacuucggcuggcagcaccuggagcucgucaacugcaaguucggccaguuccccacccugaagcugaagucccucaagcggcugaccuucaccagcaacaagggcgggaacgccuucuccgagguggaccugcccagccucgaguuccuggaccugucccgcaacgggcucagcuucaagggcugcugcucccagagcgacuucggcacgaccucccugaaguaccuggaccucagcuucaacggggugaucaccaugagcuccaacuuccugggccuggagcagcucgagcaccuggacuuccagcacagcaaccugaagcagauguccgaguucagcgucuuccucucccugcggaaccugaucuaccucgacaucagccacacccacacgcgcguggccuucaacgggaucuucaacggccuguccagccuggaggugcucaagauggcggggaacuccuuccaggagaacuuccugcccgacaucuucaccgagcugcggaaccucaccuuccuggaccugagccagugccagcucgagcagcuguccccgaccgccuucaacagccuguccagccuccagguccugaacaugucccacaacaacuucuucagccuggacacguuccccuacaagugccucaacucccuccaggugcuggacuacagccugaaccacaucaugaccagcaagaagcaggagcugcagcacuuccccuccagccuggccuuccucaaccugacccagaacgacuucgccugcacgugcgagcaccaguccuuccugcaguggaucaaggaccagcgccagcuccugguggaggucgagcggauggagugcgccacccccagcgacaagcagggcaugccggugcugucccucaacaucacgugccagaugaacaagaccaucaucggcgucagcgugcuguccgugcuggucgugagcguggucgcggugcucguguacaaguucuacuuccaccugaugcugcucgccgggugcaucaaguacggccgcggggagaacaucuacgacgccuucgucaucuacuccagccaggacgaggacugggugcggaacgagcuggugaagaaccuggaggagggcgucccgcccuuccagcucugccugcacuaccgcgacuucauccccgggguggccaucgccgcgaacaucauccacgagggcuuccacaagucccggaaggugaucgucguggugagccagcacuucauccagucccgcuggugcaucuucgaguacgagaucgcccagaccuggcaguuccugagcucccgcgccggcaucaucuucaucguccuccagaagguggagaagacccugcugcggcagcaggucgagcucuaccgccugcugagccggaacaccuaccucgagugggaggacuccgugcuggggcgccacaucuucuggcggcgccugcggaaggcccuccuggacggcaagagcuggaaccccgaggggaccgugggcaccgggugcaacuggcaggaggccacguccaucuga

SEQ ID NO: 9602 - RNA, 2520 nt, Artificial Sequence
  derived and/or modified sequence opt2 from TLR4__Homo_sapiens__AAC80227
augauguccgccucccgccucgccggcacccucauccccgccauggccuuccucuccugcguccgccccgaguccugggagcccugcgucgaggucguccccaacaucaccuaccagugcauggagcucaacuucuacaagauccccgacaaccuccccuucuccaccaagaaccucgaccucuccuucaacccccuccgccaccucggcuccuacuccuucuucuccuuccccgagcuccagguccucgaccucucccgcugcgagauccagaccaucgaggacggcgccuaccagucccucucccaccucuccacccucauccucaccggcaaccccauccagucccucgcccucggcgccuucuccggccucuccucccuccagaagcucgucgccgucgagaccaaccucgccucccucgagaacuuccccaucggccaccucaagacccucaaggagcucaacgucgcccacaaccucauccaguccuucaagcuccccgaguacuucuccaaccucaccaaccucgagcaccucgaccucuccuccaacaagauccaguccaucuacugcaccgaccuccgcguccuccaccagaugccccuccucaaccucucccucgaccucucccucaaccccaugaacuucauccagcccggcgccuucaaggagauccgccuccacaagcucacccuccgcaacaacuucgacucccucaacgucaugaagaccugcauccagggccucgccggccucgagguccaccgccucguccucggcgaguuccgcaacgagggcaaccucgagaaguucgacaaguccgcccucgagggccucugcaaccucaccaucgaggaguuccgccucgccuaccucgacuacuaccucgacgacaucaucgaccucuucaacugccucaccaacgucuccuccuucucccucgucuccgucaccaucgagcgcgucaaggacuucuccuacaacuucggcuggcagcaccucgagcucgucaacugcaaguucggccaguuccccacccucaagcucaagucccucaagcgccucaccuucaccuccaacaagggcggcaacgccuucuccgaggucgaccuccccucccucgaguuccucgaccucucccgcaacggccucuccuucaagggcugcugcucccaguccgacuucggcaccaccucccucaaguaccucgaccucuccuucaacggcgucaucaccauguccuccaacuuccucggccucgagcagcucgagcaccucgacuuccagcacuccaaccucaagcagauguccgaguucuccgucuuccucucccuccgcaaccucaucuaccucgacaucucccacacccacacccgcgucgccuucaacggcaucuucaacggccucuccucccucgagguccucaagauggccggcaacuccuuccaggagaacuuccuccccgacaucuucaccgagcuccgcaaccucaccuuccucgaccucucccagugccagcucgagcagcucucccccaccgccuucaacucccucuccucccuccagguccucaacaugucccacaacaacuucuucucccucgacaccuuccccuacaagugccucaacucccuccagguccucgacuacucccucaaccacaucaugaccuccaagaagcaggagcuccagcacuuccccuccucccucgccuuccucaaccucacccagaacgacuucgccugcaccugcgagcaccaguccuuccuccaguggaucaaggaccagcgccagcuccucgucgaggucgagcgcauggagugcgccacccccuccgacaagcagggcaugcccguccucucccucaacaucaccugccagaugaacaagaccaucaucggcgucuccguccucuccguccucgucgucuccgucgucgccguccucgucuacaaguucuacuuccaccucaugcuccucgccggcugcaucaaguacggccgcggcgagaacaucuacgacgccuucgucaucuacuccucccaggacgaggacuggguccgcaacgagcucgucaagaaccucgaggagggcgucccccccuuccagcucugccuccacuaccgcgacuucauccccggcgucgccaucgccgccaacaucauccacgagggcuuccacaagucccgcaaggucaucgucgucgucucccagcacuucauccagucccgcuggugcaucuucgaguacgagaucgcccagaccuggcaguuccucuccucccgcgccggcaucaucuucaucguccuccagaaggucgagaagacccuccuccgccagcaggucgagcucuaccgccuccucucccgcaacaccuaccucgagugggaggacuccguccucggccgccacaucuucuggcgccgccuccgcaaggcccuccucgacggcaaguccuggaaccccgagggcaccgucggcaccggcugcaacuggcaggaggccaccuccaucuga

SEQ ID NO: 9603 - RNA, 2520 nt, Artificial Sequence
  derived and/or modified sequence opt3 from TLR4__Homo_sapiens__AAC80227
augaugagcgccuccagacuggcuggcacccucauccccgcaauggccuuccuuucuugcgugaggccugagucaugggaaccaugugucgagguugugccgaacauuacauaccagugcauggaacugaauuuuuauaagauacccgacaacuugccuuucaguacuaaaaauuuagaucugagcuuuaacccacuacggcaccucggguccuacucuuucuuuucguuccccgagcugcaaguacuugaccugucacgcugugaaauccagacgauugaggauggagcguaucagagcuugagucaucucuccacccugauccugacagguaauccuauucagucucucgcuuuaggcgccuuuagcgggcuguccucacuucaaaaguugguggcagucgagacuaaccuggccagucuagaaaauuucccaaucggacaccucaaaacccugaaggagcuuaacguggcucauaaucugauacagagcuuuaaauugcccgaauacuucucuaaccucacaaaucuggagcacuuagaccuguccucaaacaagauccagagcauuuauugcaccgaucuccgaguucuucaucagaugccucuguugaaucuaagucuggaccucucucugaacccaaugaauuuuauccaaccgggcgcauucaaggagauucgucuucacaaacugacuuugagaaacaacuuugauucccucaaugugaugaagacauguauccagggucuggccggguuagaaguccacaggcuggugcuaggagaguuccggaacgaaggcaaucucgagaaauucgacaagagcgcucuggaaggccuuugcaacuugaccauagaggaguuucgccuggccuaccucgauuauuaccuggacgauauuaucgaccuuuucaauugucugacgaacguaucgucuuuuuccuugguuucagugacuauugaaagagucaaagauuucaguuacaauuuuggguggcagcaucucgagcuggugaacugcaaguucggacaguuucccaccuuaaagcugaaaagccuaaagaggcucacauucacuuccaauaaagguggcaacgcguuuucugaaguggaccugccuagccuugaguucuuggaccugucacggaaugggcucaguuuuaagggauguugcucccaaagcgauuucggcaccacaucucugaaauauuuagaccugucauuuaacggugucaucaccaugaguagcaauuuccuuggguuggaacagcucgagcaccuggauuuccagcauuccaaccuaaagcaaaugucugaguuuucgguuuuccugagccuccgcaaucugaucuaccuugacauuucccacacgcacacucgaguggcauuuaacggaauauucaacggcuugucaagucuggaaguauuaaaaauggccggcaauucuuuucaggagaacuuccucccagauaucuuuacagaacugagaaaucuuaccuuccuggacuugagccagugucagcucgagcaacugucccccacugcuuuuaacucacuaagcucucuccaggugcugaauaugucccauaacaauuucuuuagucuggauacauucccuuauaagugccuuaacagcuugcagguccuggacuacucuuuaaaucacauuaugaccuccaagaaacaggaacuccaacauuuuccaucaagucuggccuuccuuaaccugacgcagaaugauuucgcaugcaccugugagcaccagagcuuucuacaguggaucaaggaccaaaggcagcuccugguggagguugaacggauggagugcgcuacacccucggauaaacaggggaugccgguguugucccugaacauaacuugucagaugaauaagaccauuaucggagucucuguguuaagcguacucguugugucagucguggccguccugguguauaaauucuacuuucaucuuaugcuguuggcggguugcaucaaguauggccguggggaaaacauuuacgacgccuucguuaucuacaguucccaagacgaggauugggugcgcaaugagcucguaaagaaccuggaagagggagucccucccuuucagcuaugucugcacuauagagacuucauuccaggcguggcaauagcugccaacaucauucacgaagguuuucauaaaucuaggaagguuaucguggucgugagccagcacuucauccaaucccgguggugcauuuuugaguacgaaauagcucagacauggcaguuccuuucaagccgagccgggaucauuuuuaucguacuccagaaaguggagaagacucuguugcgccaacagguugagcuguauagauuacucaguaggaauaccuaccuggaaugggaggauucuguccuuggccggcauauuuucuggcgcagacugaggaaagcauugcucgacggaaaguccuggaacccugaaggcacaguggggaccggauguaauuggcaggaggccacuagcaucuga

SEQ ID NO: 9604 - RNA, 2520 nt, Artificial Sequence
  derived and/or modified sequence opt4 from TLR4__Homo_sapiens__AAC80227
augaugagcgccagcagacuggccggcacccugauccccgccauggccuuccugagcugcgugagacccgagagcugggagcccugcguggagguggugcccaacaucaccuaccagugcauggagcugaacuucuacaagauccccgacaaccugcccuucagcaccaagaaccuggaccugagcuucaacccccugagacaccugggcagcuacagcuucuucagcuuccccgagcugcaggugcuggaccugagcagaugcgagauccagaccaucgaggacggcgccuaccagagccugagccaccugagcacccugauccugaccggcaaccccauccagagccuggcccugggcgccuucagcggccugagcagccugcagaagcugguggccguggagaccaaccuggccagccuggagaacuuccccaucggccaccugaagacccugaaggagcugaacguggcccacaaccugauccagagcuucaagcugcccgaguacuucagcaaccugaccaaccuggagcaccuggaccugagcagcaacaagauccagagcaucuacugcaccgaccugagagugcugcaccagaugccccugcugaaccugagccuggaccugagccugaaccccaugaacuucauccagcccggcgccuucaaggagaucagacugcacaagcugacccugagaaacaacuucgacagccugaacgugaugaagaccugcauccagggccuggccggccuggaggugcacagacuggugcugggcgaguucagaaacgagggcaaccuggagaaguucgacaagagcgcccuggagggccugugcaaccugaccaucgaggaguucagacuggccuaccuggacuacuaccuggacgacaucaucgaccuguucaacugccugaccaacgugagcagcuucagccuggugagcgugaccaucgagagagugaaggacuucagcuacaacuucggcuggcagcaccuggagcuggugaacugcaaguucggccaguuccccacccugaagcugaagagccugaagagacugaccuucaccagcaacaagggcggcaacgccuucagcgagguggaccugcccagccuggaguuccuggaccugagcagaaacggccugagcuucaagggcugcugcagccagagcgacuucggcaccaccagccugaaguaccuggaccugagcuucaacggcgugaucaccaugagcagcaacuuccugggccuggagcagcuggagcaccuggacuuccagcacagcaaccugaagcagaugagcgaguucagcguguuccugagccugagaaaccugaucuaccuggacaucagccacacccacaccagaguggccuucaacggcaucuucaacggccugagcagccuggaggugcugaagauggccggcaacagcuuccaggagaacuuccugcccgacaucuucaccgagcugagaaaccugaccuuccuggaccugagccagugccagcuggagcagcugagccccaccgccuucaacagccugagcagccugcaggugcugaacaugagccacaacaacuucuucagccuggacaccuuccccuacaagugccugaacagccugcaggugcuggacuacagccugaaccacaucaugaccagcaagaagcaggagcugcagcacuuccccagcagccuggccuuccugaaccugacccagaacgacuucgccugcaccugcgagcaccagagcuuccugcaguggaucaaggaccagagacagcugcugguggagguggagagaauggagugcgccacccccagcgacaagcagggcaugcccgugcugagccugaacaucaccugccagaugaacaagaccaucaucggcgugagcgugcugagcgugcugguggugagcgugguggccgugcugguguacaaguucuacuuccaccugaugcugcuggccggcugcaucaaguacggcagaggcgagaacaucuacgacgccuucgugaucuacagcagccaggacgaggacugggugagaaacgagcuggugaagaaccuggaggagggcgugccccccuuccagcugugccugcacuacagagacuucauccccggcguggccaucgccgccaacaucauccacgagggcuuccacaagagcagaaaggugaucgugguggugagccagcacuucauccagagcagauggugcaucuucgaguacgagaucgcccagaccuggcaguuccugagcagcagagccggcaucaucuucaucgugcugcagaagguggagaagacccugcugagacagcagguggagcuguacagacugcugagcagaaacaccuaccuggagugggaggacagcgugcugggcagacacaucuucuggagaagacugagaaaggcccugcuggacggcaagagcuggaaccccgagggcaccgugggcaccggcugcaacuggcaggaggccaccagcaucuga

SEQ ID NO: 9605 - RNA, 2520 nt, Artificial Sequence
  derived and/or modified sequence opt5 from TLR4__Homo_sapiens__AAC80227
augaugagcgccuccagacuggcuggcacccucauccccgccauggcguuccugucuugcgugcggccugagagcugggaaccgugugucgagguugugcccaacauuacauaccagugcauggaacuuaauuuuuauaagaucccugacaaccugcccuucuccacgaaaaaucucgaucugucuuuuaacccucuucgccaccuggggagcuacuccuucuuuucuuuccccgagcuccaagugcuggaccugagcagaugugaaauucagaccaucgaggauggagcuuaucagucccucagccaucugucuacacuuauucugaccggcaauccuauccagucccucgcccugggggccuuuagcggacuuucuucccugcaaaagcucgucgcuguggagacaaaccuggccagccuggaaaauuucccgaucggccaccucaaaacccugaaggagcuuaacguugcucauaaucugauucagucuuuuaaacuccccgaauacuucuccaaccugacaaaucuugagcaccuggaccucagcuccaacaagauccagucuauuuauugcaccgaucugcgggugcugcaucagaugccucuccugaaucuuagccuggaccucucccugaaccccaugaauuuuauccaaccuggggccuucaaggagauucgccuucacaaacugacgcucagaaacaacuuugauagccugaaugucaugaagaccuguauccagggacuggcgggccucgaagugcaccggcugguucuuggcgaguuccgcaacgaagggaaucuggagaaauucgacaagucugcccucgaaggacugugcaaccugacaauugaggaguuuagacuugcuuaccucgauuauuaccuggacgauaucaucgaccuguucaauugucucaccaacguguccagcuuuucucuggucagcgugacaauugaacgggugaaagauuucuccuacaauuuuggcuggcagcaucuugagcuggucaacugcaaguucgggcaguuucccacccucaagcugaaaucucugaagcgccuuacguucacaagcaauaaaggaggcaacgccuuuuccgaaguugaccucccgagccuggaguuccuggaccucucuagaaaugggcuguccuuuaagggauguugcagccaaucugauuucggcaccacaucccuuaaauaucuggaccucagcuuuaacggcgugaucaccauguccucuaauuuccuggggcuggaacagcuugagcaccucgauuuccagcauagcaaccugaagcaaauguccgaguuuucuguguuccugagccuccggaaucugauuuaccuugacaucucccacacccacacacgcgucgcuuuuaacggaauuuucaacggccugagcucucucgaagugcugaaaauggccggaaauuccuuucaggagaacuuccugccugauaucuuuacggaacuuagaaaucucaccuuccuggaccugagccagugucagcucgagcaacugucucccacagcguuuaacucccuuagcucucugcagguucucaauaugagccauaacaauuucuuuucccuggauaccuucccuuauaagugccugaacagccuucaggugcuggacuacucucucaaucacaucaugacauccaagaaacaggaacugcaacauuuucccagcucccucgccuuccugaaccuuacccagaaugauuucgcuugcacgugugagcaccagucuuuucugcaguggauuaaggaccaacggcagcuccuggucgagguggaacgcauggagugcgccacacccagcgauaaacaggggaugccuguucugucccuuaacaucaccugucagaugaauaagaccauuaucggcgugucuguccugagcgugcucgucguguccguuguggcuguccugguguauaaauucuacuuucaucucaugcugcuugccgggugcauuaaguauggaagaggcgaaaacaucuacgacgccuucguuaucuacucuagccaagacgaggauugggugcggaaugagcuggucaagaaccucgaagagggcgugccgcccuuucagcugugucugcacuauagagacuucauuccugggguggcuaucgcggccaacauuauccacgaaggauuucauaaaucccgcaagguuauugucguggugagccagcacuucauccaaucucgguggugcauuuuugaguacgaaaucgcucagacauggcaguuccuuuccagcagagccggcaucauuuuuaucguccugcagaaaguggagaagacccuccugcgccaacagguugagcucuaucggcugcuuucuagaaauacauaccuggaaugggaggauuccgugcuggggcgccauauuuucuggcggagacuccgcaaagcccugcuugacggaaagagcuggaaccccgaaggcacggucgggaccggcuguaauuggcaggaggcuacaucuaucuga

SEQ ID NO: 9606 - protein, 858 aa, Artificial Sequence [sequence omitted]

SEQ ID NO: 9607 - RNA, 2577 nt, Artificial Sequence
  TLR5__Homo_sapiens__AAZ17462
augggagaccaccuggaccuucuccuaggaguggugcucauggccgguccuguguuuggaauuccuuccugcuccuuugauggccgaauagccuuuuaucguuucugcaaccucacccaggucccccagguccucaacaccacugagaggcuccugcugagcuucaacuauaucaggacagucacugcuucauccuuccccuuucuggaacagcugcagcugcuggagcucgggagccaguauacccccuugacuauugacaaggaggccuucagaaaccugcccaaccuuagaaucuuggaccugggaaguaguaagauauacuucuugcauccagaugcuuuucagggacuguuccaucuguuugaacuuagacuguauuucuguggucucucugaugcuguauugaaagaugguuauuucagaaauuuaaaggcuuuaacucgcuuggaucuauccaaaaaucagauucguagccuuuaccuucauccuucauuugggaaguugaauuccuuaaaguccauagauuuuuccuccaaccaaauauuccuuguaugugaacaugagcucgagccccuacaagggaaaacgcucuccuuuuuuagccucgcagcuaauagcuuguauagcagagucucaguggacuggggaaaauguaugaacccauucagaaacauggugcuggagauacuagauguuucuggaaauggcuggacaguggacaucacaggaaacuuuagcaaugccaucagcaaaagccaggccuucucuuugauucuugcccaccacaucaugggugccggguuuggcuuccauaacaucaaagauccugaccagaacacauuugcuggccuggccagaaguucagugagacaccuggaucuuucacauggguuugucuucucccugaacucacgagucuuugagacacucaaggauuugaagguucugaaccuugccuacaacaagauaaauaagauugcagaugaagcauuuuacggacuugacaaccuccaaguucucaauuugucauauaaccuucugggggaacuuuacaguucgaauuucuauggacuaccuaagguagccuacauugauuugcaaaagaaucacauugcaauaauucaagaccaaacauucaaauuccuggaaaaauuacagaccuuggaucuccgagacaaugcucuuacaaccauucauuuuauuccaagcauacccgauaucuucuugaguggcaauaaacuagugacuuugccaaagaucaaccuuacagcgaaccucauccacuuaucagaaaacaggcuagaaaaucuagauauucucuacuuucuccuacggguaccucaucuccagauucucauuuuaaaucaaaaucgcuucuccuccuguaguggagaucaaaccccuucagagaaucccagcuuagaacagcuuuuccuuggagaaaauauguugcaacuugccugggaaacugagcucuguugggauguuuuugagggacuuucucaucuucaaguucuguauuugaaucauaacuaucuuaauucccuuccaccaggaguauuuagccaucugacugcauuaaggggacuaagccucaacuccaacaggcugacaguucuuucucacaaugauuuaccugcuaauuuagagauccuggacauauccaggaaccagcuccuagcuccuaauccugauguauuuguaucacuuagugucuuggauauaacucauaacaaguucauuugugaaugugaacuuagcacuuuuaucaauuggcuuaaucacaccaaugucacuauagcugggccuccugcagacauauauuguguguacccugacucgcucucugggguuucccucuucucucuuuccacggaagguugugaugaagaggaagucuuaaagucccuaaaguucucccuuuucuuuguaugcacugucacucugacucuguuccucaugaccauccucacagucacaaaguuccggggcuucuguuuuaucuguuauaagacagcccagagacugguguucaaggaccauccccagggcacagaaccugauauguacaaauaugaugccuauuugugcuucagcagcaaagacuucacaugggugcagaaugcuuugcucaaacaccuggacacucaauacagugaccaaaacagauucaaccugugcuuugaagaaagagacuuugucccaggagaaaaccgcauugccaauauccaggaugccaucuggaacaguagaaagaucguuugucuugugagcagacacuuccuuagagauggcuggugccuugaagccuucaguuaugcccagggcaggugcuuaucugaccuuaacagugcucucaucaugguggugguuggguccuugucccaguaccaguugaugaaacaucaauccaucagaggcuuuguacagaaacagcaguauuugagguggccugaggaucuccaggauguuggcugguuucuucauaaacucucucaacagauacuaaagaaagaaaaagaaaagaagaaagacaauaacauuccguugcaaacuguagcaaccaucuccuaa

SEQ ID NO: 9608 - RNA, 2577 nt, Artificial Sequence
  derived and/or modified sequence opt1 from TLR5__Homo_sapiens__AAZ17462
augggcgaccaccuggaccuccugcugggggugguccucauggccggccccguguucgggaucccgagcugcuccuucgacggccgcaucgccuucuaccgguucugcaaccugacccaggugccccagguccugaacaccacggagcgccuccugcugagcuucaacuacauccggaccgugaccgcguccagcuuccccuuccucgagcagcugcagcugcucgagcuggggucccaguacacgccccugaccaucgacaaggaggccuuccgcaaccucccgaaccugcggauccuggaccucggcagcuccaagaucuacuuccugcaccccgacgccuuccagggccuguuccaccucuucgagcugcgccuguacuucugcgggcucagcgacgccgugcugaaggacggcuacuuccggaaccugaaggcccucacccgccuggaccuguccaagaaccagauccggagccucuaccugcaccccuccuucgggaagcugaacagccucaaguccaucgacuucagcuccaaccagaucuuccuggucugcgagcacgagcuggagccccuccagggcaagacccugagcuucuucucccuggcggccaacagccucuacucccgcgugagcguggacugggggaagugcaugaacccguuccggaacaugguccuggagauccuggacgugagcggcaacggcuggaccguggacaucacggggaacuucuccaacgccaucagcaagucccaggccuucagccucauccuggcgcaccacaucaugggcgccggguucggcuuccacaacaucaaggaccccgaccagaacaccuucgccggccuggcccgcuccagcguccggcaccucgaccugucccacggguucguguucagccugaacucccgcguguucgagacccucaaggaccugaagguccugaaccuggccuacaacaagaucaacaagaucgcggacgaggccuucuacggccucgacaaccuccaggugcugaaccugagcuacaaccugcugggggagcucuacuccagcaacuucuacggccugcccaagguggccuacaucgaccugcagaagaaccacaucgccaucauccaggaccagaccuucaaguuccucgagaagcugcagacgcuggaccuccgggacaacgcccugaccaccauccacuucauccccuccaucccggacaucuuccugagcgggaacaagcucgucacccugcccaagaucaaccugacggcgaaccucauccaccuguccgagaaccgccuggagaaccucgacauccuguacuuccugcuccgggugccccaccuccagauccugauccugaaccagaaccgcuucagcuccugcagcggcgaccagacccccuccgagaacccgagccuggagcagcuguuccucggcgagaacaugcugcagcuggccugggagaccgagcucugcugggacguguucgaggggcugagccaccuccagguccuguaccugaaccacaacuaccugaacucccucccgcccggcguguucagccaccugaccgcccugcgggggcucucccugaacagcaaccgccugacggugcucucccacaacgaccugcccgccaaccuggagauccucgacaucagccggaaccagcugcuggcccccaaccccgacgucuucgugucccucagcguccuggacaucacccacaacaaguucaucugcgagugcgagcuguccaccuucaucaacuggcucaaccacaccaacgugacgaucgcgggcccgcccgccgacaucuacugcguguaccccgacagccuguccggggucagccuguucucccucagcaccgagggcugcgacgaggaggaggugcugaagucccugaaguucagccucuucuucgugugcaccgucacccugacgcuguuccucaugaccauccugaccgugaccaaguuccgcggcuucugcuucaucugcuacaagacggcccagcgccugguguucaaggaccacccccaggggaccgagcccgacauguacaaguacgacgccuaccucugcuucuccagcaaggacuucaccuggguccagaacgcccugcugaagcaccucgacacccaguacagcgaccagaaccgguucaaccugugcuucgaggagcgcgacuucgugcccggcgagaaccggaucgcgaacauccaggacgccaucuggaacucccgcaagaucgugugccuggucagccggcacuuccuccgcgacggguggugccuggaggccuucuccuacgcccagggccggugccugagcgaccucaacuccgcgcugaucauggugguggucgggagccugucccaguaccagcucaugaagcaccagagcauccgcggcuucgugcagaagcagcaguaccugcgguggccggaggaccugcaggacgugggcugguuccuccacaagcugucccagcagauccugaagaaggagaaggagaagaagaaggacaacaacaucccccuccagacggucgccaccaucagcuga

SEQ ID NO: 9609 - RNA, 2577 nt, Artificial Sequence
  derived and/or modified sequence opt2 from TLR5__Homo_sapiens__AAZ17462
augggcgaccaccucgaccuccuccucggcgucguccucauggccggccccgucuucggcauccccuccugcuccuucgacggccgcaucgccuucuaccgcuucugcaaccucacccaggucccccagguccucaacaccaccgagcgccuccuccucuccuucaacuacauccgcaccgucaccgccuccuccuuccccuuccucgagcagcuccagcuccucgagcucggcucccaguacaccccccucaccaucgacaaggaggccuuccgcaaccuccccaaccuccgcauccucgaccucggcuccuccaagaucuacuuccuccaccccgacgccuuccagggccucuuccaccucuucgagcuccgccucuacuucugcggccucuccgacgccguccucaaggacggcuacuuccgcaaccucaaggcccucacccgccucgaccucuccaagaaccagauccgcucccucuaccuccaccccuccuucggcaagcucaacucccucaaguccaucgacuucuccuccaaccagaucuuccucgucugcgagcacgagcucgagccccuccagggcaagacccucuccuucuucucccucgccgccaacucccucuacucccgcgucuccgucgacuggggcaagugcaugaaccccuuccgcaacaugguccucgagauccucgacgucuccggcaacggcuggaccgucgacaucaccggcaacuucuccaacgccaucuccaagucccaggccuucucccucauccucgcccaccacaucaugggcgccggcuucggcuuccacaacaucaaggaccccgaccagaacaccuucgccggccucgcccgcuccuccguccgccaccucgaccucucccacggcuucgucuucucccucaacucccgcgucuucgagacccucaaggaccucaagguccucaaccucgccuacaacaagaucaacaagaucgccgacgaggccuucuacggccucgacaaccuccagguccucaaccucuccuacaaccuccucggcgagcucuacuccuccaacuucuacggccuccccaaggucgccuacaucgaccuccagaagaaccacaucgccaucauccaggaccagaccuucaaguuccucgagaagcuccagacccucgaccuccgcgacaacgcccucaccaccauccacuucauccccuccauccccgacaucuuccucuccggcaacaagcucgucacccuccccaagaucaaccucaccgccaaccucauccaccucuccgagaaccgccucgagaaccucgacauccucuacuuccuccuccgcgucccccaccuccagauccucauccucaaccagaaccgcuucuccuccugcuccggcgaccagacccccuccgagaaccccucccucgagcagcucuuccucggcgagaacaugcuccagcucgccugggagaccgagcucugcugggacgucuucgagggccucucccaccuccagguccucuaccucaaccacaacuaccucaacucccucccccccggcgucuucucccaccucaccgcccuccgcggccucucccucaacuccaaccgccucaccguccucucccacaacgaccuccccgccaaccucgagauccucgacaucucccgcaaccagcuccucgcccccaaccccgacgucuucgucucccucuccguccucgacaucacccacaacaaguucaucugcgagugcgagcucuccaccuucaucaacuggcucaaccacaccaacgucaccaucgccggcccccccgccgacaucuacugcgucuaccccgacucccucuccggcgucucccucuucucccucuccaccgagggcugcgacgaggaggagguccucaagucccucaaguucucccucuucuucgucugcaccgucacccucacccucuuccucaugaccauccucaccgucaccaaguuccgcggcuucugcuucaucugcuacaagaccgcccagcgccucgucuucaaggaccacccccagggcaccgagcccgacauguacaaguacgacgccuaccucugcuucuccuccaaggacuucaccuggguccagaacgcccuccucaagcaccucgacacccaguacuccgaccagaaccgcuucaaccucugcuucgaggagcgcgacuucguccccggcgagaaccgcaucgccaacauccaggacgccaucuggaacucccgcaagaucgucugccucgucucccgccacuuccuccgcgacggcuggugccucgaggccuucuccuacgcccagggccgcugccucuccgaccucaacuccgcccucaucauggucgucgucggcucccucucccaguaccagcucaugaagcaccaguccauccgcggcuucguccagaagcagcaguaccuccgcuggcccgaggaccuccaggacgucggcugguuccuccacaagcucucccagcagauccucaagaaggagaaggagaagaagaaggacaacaacaucccccuccagaccgucgccaccaucuccuga

SEQ ID NO: 9610 - RNA, 2577 nt, Artificial Sequence
  derived and/or modified sequence opt3 from TLR5__Homo_sapiens__AAZ17462
augggcgaccaccuggaucuccuucuggggguggucuugauggccggacccguuuucgguaucccuagcugcuccuuugacggcagaauugcuuucuacagguuuuguaacuuaacccaggugccacaaguacugaauacaacugagcggcuacuccugucuuucaacuauauacgcacggugaccgcaucaaguuuuccguuccuugaacagcugcaguugcucgagcuggggagccaguacacaccccugacuaucgauaaggaagccuuucgaaaucucccuaacuuacguauucuggaccuuggauccucuaaaaucuauuucuugcauccagaugcguuucaaggccuguuccaccuauuugagcucagacuguacuucugcggucuuucggacgcuguccugaaggauggguauuuuaggaauuugaaagcccucacccggcuggacuuaucaaagaaccagauucgcagccuguaccuccaucccaguuucggaaaacuuaauucccugaagucuaucgauuucagcuccaaccagauauuuuuggugugugaacacgagcuagagccucugcagggcaagacacucucauucuuuagucuggcagccaauagccuuuauucuagaguuuccguggacuggggcaaaugcaugaacccauucaggaauaugguccuggaaaucuuggaugugucagggaacggauggaccguagacauuacugguaauuuuagcaacgcuaucaguaagucucaagcauucucccucauucuggcccaucacaucaugggcgcuggguuuggauuccacaauauaaaagaucccgaccagaacacauuugccggcuuagcgcggagcucgguucgccaucuggaccuaucucacgguuucguguuuucccucaacucacgagucuucgagacccugaaggaucuuaaaguguugaaucuggcauacaacaagauuaauaagaucgccgacgaggcuuuuuacgggcucgauaaccugcaagugcuuaaucugaguuauaacuugcucggagaacuguacagcuccaauuucuauggcuuaccuaaagucgccuacauugaccugcagaagaaccauaucgcaaucauucaggaucagacguucaaauuucuagagaagcuccagacucuggaccuuagagauaaugcuuugaccacaauacacuucaucccaucuauuccggacaucuuucugagcggcaacaaacucguuacucugcccaagauaaauuuaaccgccaaccugauucaccuuucagaaaauagguuggagaaccucgauauccuguauuuccuacugcgggugccucaucuccaaauccugauucuuaaucagaaccguuuuaguuccuguagcggggaccagacaccaucugaaaaccccucauuggagcagcuguucuuaggagaaaauaugcuccaacuggcgugggagaccgagcuuugcugggauguauuugaaggucugagucaccuccagguguuguaccugaaccauaauuaucuaaacagccugccuccaggcgucuucucccaccucacggcccugcgcgggcuuucuuugaacucgaauagacugacuguguuaagccauaaugaccuccccgcaaaccuggagauccuugacauuuccaggaaucagcugcuagcuccgaacccugauguuuuugugucacucaguguccuggacauaacacacaauaaauucaucugugaaugcgaguugucuaccuuuauuaacuggcugaaucacacuaacgugacaaucgccggacccccagcugauaucuacuguguauacccugacagcuuauccggcguuucacucuucagccugucuaccgaagguugcgaugaggaggaagugcuuaagucccugaaguuuaguuuguucuucgucuguacggugacccucacacuguuucuaaugacuauucugaccgucacaaaauuccggggguuuugcuucauaugcuauaagacugcccagcgacuuguguuuaaagaccauccccaaggcaccgagccagauauguacaaguaugacgcauaccucuguuucagcucuaaagauuuuacauggguucagaaugcccuguugaagcaccuggacacccaguauuccgaucagaaccgcuucaacuuaugcuuugaagagagagacuucgugcccggagaaaauaggaucgcuaacauucaagaugcgaucuggaauagucggaagauuguaugucucgucucacgccauuuucugagagacggcuggugccuugaggcauucagcuacgcccaggggaggugucugucggacuugaacuccgcucucaucauggugguugugggaucucugagccaguaucagcuaaugaaacaccaaucaauacgugguuucguccagaagcagcaauaccugcgguggccugaggaucuucaggacgugggcugguuucuccacaaacugagucagcagaucuugaagaaagaaaaggagaagaaaaaggauaauaacauuccauuacaaacuguagccacgaucuccuga

SEQ ID NO: 9611 - RNA, 2577 nt, Artificial Sequence
  derived and/or modified sequence opt4 from TLR5__Homo_sapiens__AAZ17462
augggcgaccaccuggaccugcugcugggcguggugcugauggccggccccguguucggcauccccagcugcagcuucgacggcagaaucgccuucuacagauucugcaaccugacccaggugccccaggugcugaacaccaccgagagacugcugcugagcuucaacuacaucagaaccgugaccgccagcagcuuccccuuccuggagcagcugcagcugcuggagcugggcagccaguacaccccccugaccaucgacaaggaggccuucagaaaccugcccaaccugagaauccuggaccugggcagcagcaagaucuacuuccugcaccccgacgccuuccagggccuguuccaccuguucgagcugagacuguacuucugcggccugagcgacgccgugcugaaggacggcuacuucagaaaccugaaggcccugaccagacuggaccugagcaagaaccagaucagaagccuguaccugcaccccagcuucggcaagcugaacagccugaagagcaucgacuucagcagcaaccagaucuuccuggugugcgagcacgagcuggagccccugcagggcaagacccugagcuucuucagccuggccgccaacagccuguacagcagagugagcguggacuggggcaagugcaugaaccccuucagaaacauggugcuggagauccuggacgugagcggcaacggcuggaccguggacaucaccggcaacuucagcaacgccaucagcaagagccaggccuucagccugauccuggcccaccacaucaugggcgccggcuucggcuuccacaacaucaaggaccccgaccagaacaccuucgccggccuggccagaagcagcgugagacaccuggaccugagccacggcuucguguucagccugaacagcagaguguucgagacccugaaggaccugaaggugcugaaccuggccuacaacaagaucaacaagaucgccgacgaggccuucuacggccuggacaaccugcaggugcugaaccugagcuacaaccugcugggcgagcuguacagcagcaacuucuacggccugcccaagguggccuacaucgaccugcagaagaaccacaucgccaucauccaggaccagaccuucaaguuccuggagaagcugcagacccuggaccugagagacaacgcccugaccaccauccacuucauccccagcauccccgacaucuuccugagcggcaacaagcuggugacccugcccaagaucaaccugaccgccaaccugauccaccugagcgagaacagacuggagaaccuggacauccuguacuuccugcugagagugccccaccugcagauccugauccugaaccagaacagauucagcagcugcagcggcgaccagacccccagcgagaaccccagccuggagcagcuguuccugggcgagaacaugcugcagcuggccugggagaccgagcugugcugggacguguucgagggccugagccaccugcaggugcuguaccugaaccacaacuaccugaacagccugccccccggcguguucagccaccugaccgcccugagaggccugagccugaacagcaacagacugaccgugcugagccacaacgaccugcccgccaaccuggagauccuggacaucagcagaaaccagcugcuggcccccaaccccgacguguucgugagccugagcgugcuggacaucacccacaacaaguucaucugcgagugcgagcugagcaccuucaucaacuggcugaaccacaccaacgugaccaucgccggcccccccgccgacaucuacugcguguaccccgacagccugagcggcgugagccuguucagccugagcaccgagggcugcgacgaggaggaggugcugaagagccugaaguucagccuguucuucgugugcaccgugacccugacccuguuccugaugaccauccugaccgugaccaaguucagaggcuucugcuucaucugcuacaagaccgcccagagacugguguucaaggaccacccccagggcaccgagcccgacauguacaaguacgacgccuaccugugcuucagcagcaaggacuucaccugggugcagaacgcccugcugaagcaccuggacacccaguacagcgaccagaacagauucaaccugugcuucgaggagagagacuucgugcccggcgagaacagaaucgccaacauccaggacgccaucuggaacagcagaaagaucgugugccuggugagcagacacuuccugagagacggcuggugccuggaggccuucagcuacgcccagggcagaugccugagcgaccugaacagcgcccugaucauggugguggugggcagccugagccaguaccagcugaugaagcaccagagcaucagaggcuucgugcagaagcagcaguaccugagauggcccgaggaccugcaggacgugggcugguuccugcacaagcugagccagcagauccugaagaaggagaaggagaagaagaaggacaacaacaucccccugcagaccguggccaccaucagcuga

SEQ ID NO: 9612 - RNA, 2577 nt, Artificial Sequence
  derived and/or modified sequence opt5 from TLR5__Homo_sapiens__AAZ17462
augggcgaccaccuggaucuccugcuuggggugguccugauggccggacccguuuucggcaucccuagcugcuccuuugacgggagaauugcuuucuaccgguuuuguaaccucacccaggugccgcaagugcugaauacaacggagcgccuucugcucucuuucaacuauaucagaaccgucacagccagcuccuuucccuuccuggaacagcugcagcuccuggagcuuggaucucaguacaccccucugacaauugauaaggaagcguuucggaaucuccccaaccugcgcauccuugaccugggcagcuccaaaauuuauuuccuccauccugaugcuuuucaagggcuguuccaccuguuugagcucagacuguacuucugcggacuuucugacgccgugcugaaggauggcuauuuucggaaucucaaagcccugacccgccuugaccugagcaagaaccagaucagaucccucuaccugcaucccagcuucggcaaacucaauucucucaaguccaucgauuucagcucuaaccagauuuuucugguuugugaacacgagcuugagccucugcaggggaagacacucuccuucuuuagccuggcugccaauucucuuuauucccgggugagcgucgacuggggaaaaugcaugaacccguuccgcaauauggugcuggaaauccucgauguuuccggcaacggguggaccguggacauuacgggaaauuuuucuaacgcuaucagcaagucccaagccuucagccugauucuggcgcaucacaucaugggcgccggguuuggauuccacaauauuaaagaucccgaccagaacaccuuugcuggccucgccagaucuuccguccggcaucuggaccuuagccacggcuucguguuuucucugaacagccgcguguucgagacacucaaggaucugaaaguccugaaucuugcuuacaacaagaucaauaagaucgccgacgaagcguuuuacgggcucgauaaccugcagguucugaaucucuccuauaaccugcuuggagagcuguacucuagcaauuucuauggccucccuaaaguggccuacauugaccugcagaagaaccauaucgcuauuauccaagaucagaccuucaaauuucuggagaagcugcagacacucgaccugagagauaaugcccugaccacgauucacuucauccccuccaucccugacauuuuucucagcgggaacaaacuggugacacuucccaagaucaaucugaccgcuaaccucauucaccugucugaaaaucggcuggagaaccuugauauccucuauuuccugcugcgcgucccgcaucuccaaauucugauccuuaaucagaacagauuuuccagcuguucuggagaccagacaccuuccgaaaaccccagccuggagcagcuguuccugggcgaaaauaugcugcaacuugccugggagaccgagcucugcugggauguguuugaagggcugucccaccuucagguucucuaccugaaccauaauuaucuuaacucucugccucccggaguguucagccaccucaccgcccugcggggccugucccuuaauucuaacagacugacaguccucagccauaaugaccugcccgcuaaccucgagauccuggacauuucccgcaaucagcuucuggcgccuaacccggauguguuuguuagccucucugugcuggacaucacgcacaauaaauucauuugugaaugcgagcuguccaccuuuaucaacuggcuuaaucacacaaacgucaccauugccgggcccccugcugauaucuacuguguguaccccgacagccugucuggcgucucccucuucagccugucuacagaaggaugcgaugaggaggaagugcucaagagccugaaguuuucccuuuucuucguuuguaccgugacgcugacacucuuucugaugaccauucugaccgucacaaaauuccggggcuuuugcuucaucugcuauaagaccgcccagagacuuguguuuaaagaccauccucaagggacagagcccgauauguacaaguaugacgccuaccuguguuucagcucuaaagauuuuacguggguucagaaugcucuccugaagcaccucgacacccaguauuccgaucagaaccgcuucaaccugugcuuugaggaacgggacuucgugccgggagaaaauagaaucgccaacauucaagaugcgaucuggaauagccgcaagauugucugucuugugucccggcauuuucugagagacggcuggugccuggaggcuuucucuuacgcccaggggcgcugucucagcgaccugaacuccgcccuuaucauggugguugucggcucucugagccaguaucagcucaugaaacaccaauccauucggggauucgugcagaagcagcaauaccugagauggccugaggaucuccaggacgugggcugguuucugcacaaacuuucucagcagauccugaagaaagaaaaggagaagaaaaaggauaauaacaucccccugcaaacagucgcuaccauuagcuga

SEQ ID NO: 9613 - protein, 858 aa, Artificial Sequence [sequence omitted]

SEQ ID NO: 9614 - RNA, 2577 nt, Artificial Sequence
  TLR5__Homo_sapiens__AAZ17465
augggagaccaccuggaccuucuccuaggaguggugcucauggccgguccuguguuuggaauuccuuccugcuccuuugauggccgaauagccuuuuaucguuucugcaaccucacccaggucccccagguccucaacaccacugagaggcuccugcugagcuucaacuauaucaggacagucacugcuucauccuuccccuuucuggaacagcugcagcugcuggagcucgggagccaguauauccccuugacuauugacaaggaggccuucagaaaccugcccaaccuuagaaucuuggaccugggaaguaguaagauauacuucuugcauccagaugcuuuucagggacuguuccaucuguuugaacuuagacuguauuucuguggucucucugaugcuguauugaaagaugguuauuucagaaauuuaaaggcuuuaacucgcuuggaucuauccaaaaaucagauucguagccuuuaccuucauccuucauuugggaaguugaauuccuuaaaguccauagauuuuuccuccaaccaaauauuccuuguaugugaacaugagcucgagccccuacaagggaaaacgcucuccuuuuuuagccucgcagcuaauagcuuguauagcagagucucaguggacuggggaaaauguaugaacccauucagaaacauggugcuggagauacuagauguuucuggaaauggcuggacaguggacaucacaggaaacuuuagcaaugccaucagcaaaagccaggccuucucuuugauucuugcccaccacaucaugggugccggguuuggcuuccauaacaucaaagauccugaccagaacacauuugcuggccuggccagaaguucagugagacaccuggaucuuucacauggguuugucuucucccugaacucacgagucuuugagacacucaaggauuugaagguucugaaccuugccuacaacaagauaaauaagauugcagaugaagcauuuuacggacuugacaaccuccaaguucucaauuugucauauaaccuucugggggaacuuuacaguucgaauuucuauggacuaccuaagguagccuacauugauuugcaaaagaaucacauugcaauaauucaagaccaaacauucaaauuccuggaaaaauuacagaccuuggaucuccgagacaaugcucuuacaaccauucauuuuauuccaagcauacccgauaucuucuugaguggcaauaaacuagugacuuugccaaagaucaaccuuacagcgaaccucauccacuuaucagaaaacaggcuagaaaaucuagauauucucuacuuucuccuacggguaccucaucuccagauucucauuuuaaaucaaaaucgcuucuccuccuguaguggagaucaaaccccuucagagaaucccagcuuagaacagcuuuuccuuggagaaaauauguugcaacuugccugggaaacugagcucuguugggauguuuuugagggacuuucucaucuucaaguucuguauuugaaucauaacuaucuuaauucccuuccaccaggaguauuuagccaucugacugcauuaaggggacuaagccucaacuccaacaggcugacaguucuuucucacaaugauuuaccugcuaauuuagagauccuggacauauccaggaaccagcuccuagcuccuaauccugauguauuuguaucacuuagugucuuggauauaacucauaacaaguucauuugugaaugugaacuuagcacuuuuaucaauuggcuuaaucacaccaaugucacuauagcugggccuccugcagacauauauuguguguacccugacucguucucugggguuucccucuucucucuuuccacggaagguugugaugaagaggaagucuuaaagucccuaaaguucucccuuuucuuuguaugcacugucacucugacucuguuccucaugaccauccucacagucacaaaguuccggggcuucuguuuuaucuguuauaagacagcccagagacugguguucaaggaccauccccagggcacagaaccugauauguacaaauaugaugccuauuugugcuucagcagcaaagacuucacaugggugcagaaugcuuugcucaaacaccuggacacucaauacagugaccaaaacagauucaaccugugcuuugaagaaagagacuuugucccaggagaaaaccgcauugccaauauccaggaugccaucuggaacaguagaaagaucguuugucuugugagcagacacuuccuuagagauggcuggugccuugaagccuucaguuaugcccagggcaggugcuuaucugaccuuaacagugcucucaucaugguggugguuggguccuugucccaguaccaguugaugaaacaucaauccaucagaggcuuuguacagaaacagcaguauuugagguggccugaggaucuccaggauguuggcugguuucuucauaaacucucucaacagauacuaaagaaagaaaaagaaaagaagaaagacaauaacauuccguugcaaacuguagcaaccaucuccuaa

SEQ ID NO: 9615 - RNA, 2577 nt, Artificial Sequence
  derived and/or modified sequence opt1 from TLR5__Homo_sapiens__AAZ17465
augggcgaccaccuggaccuccugcugggggugguccucauggccggccccguguucgggaucccgagcugcuccuucgacggccgcaucgccuucuaccgguucugcaaccugacccaggugccccagguccugaacaccacggagcgccuccugcugagcuucaacuacauccggaccgugaccgcguccagcuuccccuuccucgagcagcugcagcugcucgagcuggggucccaguacaucccccugaccaucgacaaggaggccuuccgcaaccucccgaaccugcggauccuggaccucggcagcuccaagaucuacuuccugcaccccgacgccuuccagggccuguuccaccucuucgagcugcgccuguacuucugcgggcucagcgacgccgugcugaaggacggcuacuuccggaaccugaaggcccucacgcgccuggaccuguccaagaaccagauccggagccucuaccugcaccccuccuucgggaagcugaacagccucaaguccaucgacuucagcuccaaccagaucuuccuggucugcgagcacgagcuggagccccuccagggcaagacccugagcuucuucucccuggcggccaacagccucuacucccgcgugagcguggacugggggaagugcaugaacccguuccggaacaugguccuggagauccuggacgugagcggcaacggcuggaccguggacaucaccgggaacuucuccaacgccaucagcaagucccaggccuucagccucauccuggcgcaccacaucaugggcgccggguucggcuuccacaacaucaaggaccccgaccagaacacguucgccggccuggcccgcuccagcguccggcaccucgaccugucccacggguucguguucagccugaacucccgcguguucgagacccucaaggaccugaagguccugaaccuggccuacaacaagaucaacaagaucgcggacgaggccuucuacggccucgacaaccuccaggugcugaaccugagcuacaaccugcugggggagcucuacuccagcaacuucuacggccugcccaagguggccuacaucgaccugcagaagaaccacaucgccaucauccaggaccagaccuucaaguuccucgagaagcugcagacccuggaccuccgggacaacgcccugacgaccauccacuucauccccuccaucccggacaucuuccugagcgggaacaagcucgucacccugcccaagaucaaccugaccgcgaaccucauccaccuguccgagaaccgccuggagaaccucgacauccuguacuuccugcuccgggugccccaccuccagauccugauccugaaccagaaccgcuucagcuccugcagcggcgaccagacgcccuccgagaacccgagccuggagcagcuguuccucggcgagaacaugcugcagcuggccugggagaccgagcucugcugggacguguucgaggggcugagccaccuccagguccuguaccugaaccacaacuaccugaacucccucccgcccggcguguucagccaccugaccgcccugcgggggcucucccugaacagcaaccgccugaccgugcucucccacaacgaccugcccgccaaccuggagauccucgacaucagccggaaccagcugcuggcccccaaccccgacgucuucgugucccucagcguccuggacaucacgcacaacaaguucaucugcgagugcgagcuguccaccuucaucaacuggcucaaccacaccaacgugaccaucgcgggcccgcccgccgacaucuacugcguguaccccgacagcuucuccggggucagccuguucucccugagcacggagggcugcgacgaggaggaggugcucaagucccugaaguucagccuguucuucgugugcaccgucacccucacccuguuccugaugacgauccucaccgugaccaaguuccgcggcuucugcuucaucugcuacaagaccgcccagcgccugguguucaaggaccacccccaggggacggagcccgacauguacaaguacgacgccuaccugugcuucuccagcaaggacuucaccuggguccagaacgcccuccugaagcaccuggacacccaguacagcgaccagaaccgguucaaccucugcuucgaggagcgcgacuucgugcccggcgagaaccggaucgcgaacauccaggacgccaucuggaacucccgcaagaucgugugccuggucagccggcacuuccugcgcgacggguggugccucgaggccuucuccuacgcccagggccggugccugagcgaccugaacuccgcgcucaucauggugguggucgggagccugucccaguaccagcugaugaagcaccagagcauccgcggcuucgugcagaagcagcaguaccuccgguggccggaggaccugcaggacgugggcugguuccugcacaagcucucccagcagauccugaagaaggagaaggagaagaagaaggacaacaacaucccccugcagaccgucgccacgaucagcuga

SEQ ID NO: 9616 - RNA, 2577 nt, Artificial Sequence
  derived and/or modified sequence opt2 from TLR5__Homo_sapiens__AAZ17465
augggcgaccaccucgaccuccuccucggcgucguccucauggccggccccgucuucggcauccccuccugcuccuucgacggccgcaucgccuucuaccgcuucugcaaccucacccaggucccccagguccucaacaccaccgagcgccuccuccucuccuucaacuacauccgcaccgucaccgccuccuccuuccccuuccucgagcagcuccagcuccucgagcucggcucccaguacaucccccucaccaucgacaaggaggccuuccgcaaccuccccaaccuccgcauccucgaccucggcuccuccaagaucuacuuccuccaccccgacgccuuccagggccucuuccaccucuucgagcuccgccucuacuucugcggccucuccgacgccguccucaaggacggcuacuuccgcaaccucaaggcccucacccgccucgaccucuccaagaaccagauccgcucccucuaccuccaccccuccuucggcaagcucaacucccucaaguccaucgacuucuccuccaaccagaucuuccucgucugcgagcacgagcucgagccccuccagggcaagacccucuccuucuucucccucgccgccaacucccucuacucccgcgucuccgucgacuggggcaagugcaugaaccccuuccgcaacaugguccucgagauccucgacgucuccggcaacggcuggaccgucgacaucaccggcaacuucuccaacgccaucuccaagucccaggccuucucccucauccucgcccaccacaucaugggcgccggcuucggcuuccacaacaucaaggaccccgaccagaacaccuucgccggccucgcccgcuccuccguccgccaccucgaccucucccacggcuucgucuucucccucaacucccgcgucuucgagacccucaaggaccucaagguccucaaccucgccuacaacaagaucaacaagaucgccgacgaggccuucuacggccucgacaaccuccagguccucaaccucuccuacaaccuccucggcgagcucuacuccuccaacuucuacggccuccccaaggucgccuacaucgaccuccagaagaaccacaucgccaucauccaggaccagaccuucaaguuccucgagaagcuccagacccucgaccuccgcgacaacgcccucaccaccauccacuucauccccuccauccccgacaucuuccucuccggcaacaagcucgucacccuccccaagaucaaccucaccgccaaccucauccaccucuccgagaaccgccucgagaaccucgacauccucuacuuccuccuccgcgucccccaccuccagauccucauccucaaccagaaccgcuucuccuccugcuccggcgaccagacccccuccgagaaccccucccucgagcagcucuuccucggcgagaacaugcuccagcucgccugggagaccgagcucugcugggacgucuucgagggccucucccaccuccagguccucuaccucaaccacaacuaccucaacucccucccccccggcgucuucucccaccucaccgcccuccgcggccucucccucaacuccaaccgccucaccguccucucccacaacgaccuccccgccaaccucgagauccucgacaucucccgcaaccagcuccucgcccccaaccccgacgucuucgucucccucuccguccucgacaucacccacaacaaguucaucugcgagugcgagcucuccaccuucaucaacuggcucaaccacaccaacgucaccaucgccggcccccccgccgacaucuacugcgucuaccccgacuccuucuccggcgucucccucuucucccucuccaccgagggcugcgacgaggaggagguccucaagucccucaaguucucccucuucuucgucugcaccgucacccucacccucuuccucaugaccauccucaccgucaccaaguuccgcggcuucugcuucaucugcuacaagaccgcccagcgccucgucuucaaggaccacccccagggcaccgagcccgacauguacaaguacgacgccuaccucugcuucuccuccaaggacuucaccuggguccagaacgcccuccucaagcaccucgacacccaguacuccgaccagaaccgcuucaaccucugcuucgaggagcgcgacuucguccccggcgagaaccgcaucgccaacauccaggacgccaucuggaacucccgcaagaucgucugccucgucucccgccacuuccuccgcgacggcuggugccucgaggccuucuccuacgcccagggccgcugccucuccgaccucaacuccgcccucaucauggucgucgucggcucccucucccaguaccagcucaugaagcaccaguccauccgcggcuucguccagaagcagcaguaccuccgcuggcccgaggaccuccaggacgucggcugguuccuccacaagcucucccagcagauccucaagaaggagaaggagaagaagaaggacaacaacaucccccuccagaccgucgccaccaucuccuga

SEQ ID NO: 9617 - RNA, 2577 nt, Artificial Sequence
  derived and/or modified sequence opt3 from TLR5__Homo_sapiens__AAZ17465
augggcgaccaccuggaucuccuucuggggguggucuugauggccggacccguuuucgguaucccuagcugcuccuuugacggcagaauugcuuucuacagguuuuguaacuuaacccaggugccacaaguacugaauacaacugagcggcuacuccugucuuucaacuauauacgcacggugaccgcaucaaguuuuccguuccuugaacagcugcaguugcucgagcuggggagccaguacaucccccugacaauugauaaggaagccuuucgaaaucucccuaacuuacguauccuggaccuuggauccucuaaaauuuauuucuugcauccagaugcguuucaaggccuguuccaccuauuugagcucagacuguacuucugcggucuuucggacgcuguccugaaggauggguauuuuaggaauuugaaagcccucacucggcuggacuuaucaaagaaccagauccgcagccuguaccuccaucccaguuucggaaaacuuaauucccugaagucuauagauuucagcuccaaccagaucuuuuuggugugugaacacgagcuagagccucugcagggcaagacccucucauucuuuagucuggcagccaauagccuuuauucuagaguuuccguggacuggggcaaaugcaugaacccauucaggaauaugguccuggaaauuuuggaugugucagggaacggauggacaguagacaucaccgguaauuuuagcaacgcuauuaguaagucucaagcauucucccucauccuggcccaucacauaaugggcgcuggguuuggauuccacaauauuaaagaucccgaccagaacacuuuugccggcuuagcgcggagcucgguucgccaucuggaccuaucucacgguuucguguuuucccucaacucacgagucuucgagacacugaaggaucuuaaaguguugaaucuggcauacaacaagaucaauaagauugccgacgaggcuuuuuacgggcucgauaaccugcaagugcuuaaucugaguuauaacuugcucggagaacuguacagcuccaauuucuauggcuuaccuaaagucgccuacaucgaccugcagaagaaccauaucgcaauuauacaggaucagaccuucaaauuucuagagaagcuccagacgcuggaccuuagagauaaugcuuugacuaccauccacuucauuccaucuaucccggacauauuucugagcggcaacaaacucguuacacugcccaagauuaauuuaacugccaaccugauccaccuuucagaaaauagguuggagaaccucgauauccuguauuuccuacugcgggugccucaucuccaaauucugauccuuaaucagaaccguuuuaguuccuguagcggggaccagaccccaucugaaaaccccucauuggagcagcuguucuuaggagaaaauaugcuccaacuggcgugggagacagagcuuugcugggauguauuugaaggucugagucaccuccagguguuguaccugaaccauaauuaucuaaacagccugccuccaggcgucuucucccaccucaccgcccugcgcgggcuuucuuugaacucgaauagacugacgguguuaagccauaaugaccuccccgcaaaccuggagauucuugacauauccaggaaucagcugcuagcuccgaacccugauguuuuugugucacucaguguccuggacaucacucacaauaaauucauuugugaaugcgaguugucuacauuuaucaacuggcugaaucacaccaacgugacuaucgccggacccccagcugauauuuacuguguauacccugacagcuucuccggcguuucauuauuuagccucucuacagaagguugcgaugaggaggaagugcugaagucccuuaaguucagucuguucuuugucuguaccgugacguugacccucuuccugaugacaauacuaacugucaccaaauuucggggguucugcuuuaucugcuauaagacagcccagcgacugguguucaaagaccauccccaaggcacugagccagauauguacaaguaugacgcauaccuuuguuuuagcucuaaagauuucaccuggguucagaaugcccuccugaagcacuuggacacacaguauuccgaucagaaccgcuuuaaccugugcuucgaagagagagacuuugugcccggagaaaauaggauugcuaacauccaagaugcgauuuggaauagucggaagaucguauguuuagucucacgccauuuccucagagacggcuggugccuggaggcauucagcuacgcccaggggaggugucuuucggaccugaacuccgcuuugauaauggugguugugggaucucucagccaguaucagcugaugaaacaccaaucaauccgugguuuuguccagaagcagcaauaccuacgguggccugaggaucugcaggacgugggcugguuccuucacaaacucagucagcagauucugaagaaagaaaaggagaagaaaaaggauaauaacaucccauugcaaaccguagccacuauuuccuga

SEQ ID NO: 9618 - RNA, 2577 nt, Artificial Sequence
  derived and/or modified sequence opt4 from TLR5__Homo_sapiens__AAZ17465
augggcgaccaccuggaccugcugcugggcguggugcugauggccggccccguguucggcauccccagcugcagcuucgacggcagaaucgccuucuacagauucugcaaccugacccaggugccccaggugcugaacaccaccgagagacugcugcugagcuucaacuacaucagaaccgugaccgccagcagcuuccccuuccuggagcagcugcagcugcuggagcugggcagccaguacaucccccugaccaucgacaaggaggccuucagaaaccugcccaaccugagaauccuggaccugggcagcagcaagaucuacuuccugcaccccgacgccuuccagggccuguuccaccuguucgagcugagacuguacuucugcggccugagcgacgccgugcugaaggacggcuacuucagaaaccugaaggcccugaccagacuggaccugagcaagaaccagaucagaagccuguaccugcaccccagcuucggcaagcugaacagccugaagagcaucgacuucagcagcaaccagaucuuccuggugugcgagcacgagcuggagccccugcagggcaagacccugagcuucuucagccuggccgccaacagccuguacagcagagugagcguggacuggggcaagugcaugaaccccuucagaaacauggugcuggagauccuggacgugagcggcaacggcuggaccguggacaucaccggcaacuucagcaacgccaucagcaagagccaggccuucagccugauccuggcccaccacaucaugggcgccggcuucggcuuccacaacaucaaggaccccgaccagaacaccuucgccggccuggccagaagcagcgugagacaccuggaccugagccacggcuucguguucagccugaacagcagaguguucgagacccugaaggaccugaaggugcugaaccuggccuacaacaagaucaacaagaucgccgacgaggccuucuacggccuggacaaccugcaggugcugaaccugagcuacaaccugcugggcgagcuguacagcagcaacuucuacggccugcccaagguggccuacaucgaccugcagaagaaccacaucgccaucauccaggaccagaccuucaaguuccuggagaagcugcagacccuggaccugagagacaacgcccugaccaccauccacuucauccccagcauccccgacaucuuccugagcggcaacaagcuggugacccugcccaagaucaaccugaccgccaaccugauccaccugagcgagaacagacuggagaaccuggacauccuguacuuccugcugagagugccccaccugcagauccugauccugaaccagaacagauucagcagcugcagcggcgaccagacccccagcgagaaccccagccuggagcagcuguuccugggcgagaacaugcugcagcuggccugggagaccgagcugugcugggacguguucgagggccugagccaccugcaggugcuguaccugaaccacaacuaccugaacagccugccccccggcguguucagccaccugaccgcccugagaggccugagccugaacagcaacagacugaccgugcugagccacaacgaccugcccgccaaccuggagauccuggacaucagcagaaaccagcugcuggcccccaaccccgacguguucgugagccugagcgugcuggacaucacccacaacaaguucaucugcgagugcgagcugagcaccuucaucaacuggcugaaccacaccaacgugaccaucgccggcccccccgccgacaucuacugcguguaccccgacagcuucagcggcgugagccuguucagccugagcaccgagggcugcgacgaggaggaggugcugaagagccugaaguucagccuguucuucgugugcaccgugacccugacccuguuccugaugaccauccugaccgugaccaaguucagaggcuucugcuucaucugcuacaagaccgcccagagacugguguucaaggaccacccccagggcaccgagcccgacauguacaaguacgacgccuaccugugcuucagcagcaaggacuucaccugggugcagaacgcccugcugaagcaccuggacacccaguacagcgaccagaacagauucaaccugugcuucgaggagagagacuucgugcccggcgagaacagaaucgccaacauccaggacgccaucuggaacagcagaaagaucgugugccuggugagcagacacuuccugagagacggcuggugccuggaggccuucagcuacgcccagggcagaugccugagcgaccugaacagcgcccugaucauggugguggugggcagccugagccaguaccagcugaugaagcaccagagcaucagaggcuucgugcagaagcagcaguaccugagauggcccgaggaccugcaggacgugggcugguuccugcacaagcugagccagcagauccugaagaaggagaaggagaagaagaaggacaacaacaucccccugcagaccguggccaccaucagcuga

SEQ ID NO: 9619 - RNA, 2577 nt, Artificial Sequence
  derived and/or modified sequence opt5 from TLR5__Homo_sapiens__AAZ17465
augggcgaccaccuggaucuccugcuuggggugguccugauggccggacccguuuucggcaucccuagcugcuccuuugacgggagaauugcuuucuaccgguuuuguaaccucacccaggugccgcaagugcugaauacaacggagcgccuucugcucucuuucaacuauaucagaaccgucacagccagcuccuuucccuuccuggaacagcugcagcuccuggagcuuggaucucaguacauuccucugaccaucgauaaggaagcguuucggaaucuccccaaccugcgcauucuugaccugggcagcuccaaaaucuauuuccuccauccugaugcuuuucaagggcuguuccaccuguuugagcucagacuguacuucugcggacuuucugacgccgugcugaaggauggcuauuuucggaaucucaaagcccugacacgccuugaccugagcaagaaccagaucagaucccucuaccugcaucccagcuucggcaaacucaauucucucaaguccauugauuucagcucuaaccagaucuuucugguuugugaacacgagcuugagccucugcaggggaagacccucuccuucuuuagccuggcugccaauucucuuuauucccgggugagcgucgacuggggaaaaugcaugaacccguuccgcaauauggugcuggaaauucucgauguuuccggcaacggguggacaguggacaucaccggaaauuuuucuaacgcuauuagcaagucccaagccuucagccugauccuggcgcaucacauuaugggcgccggguuuggauuccacaauaucaaagaucccgaccagaacacguuugcuggccucgccagaucuuccguccggcaucuggaccuuagccacggcuucguguuuucucugaacagccgcguguucgagacccucaaggaucugaaaguccugaaucuugcuuacaacaagaucaauaagauugccgacgaagcguuuuacgggcucgauaaccugcagguucugaaucucuccuauaaccugcuuggagagcuguacucuagcaauuucuauggccucccuaaaguggccuacaucgaccugcagaagaaccauauugcuaucauucaagaucagacauucaaauuucuggagaagcugcagacccucgaccugagagauaaugcccugacaaccauccacuucauccccuccauuccugacaucuuucucagcgggaacaaacuggugacgcuucccaagauuaaucugacagcuaaccucauccaccugucugaaaaucggcuggagaaccuugauauucucuauuuccugcugcgcgucccgcaucuccaaauccugauccuuaaucagaacagauuuuccagcuguucuggagaccagaccccuuccgaaaaccccagccuggagcagcuguuccugggcgaaaauaugcugcaacuugccugggagacagagcucugcugggauguguuugaagggcugucccaucugcagguucucuaccugaaccacaauuaucuuaacucucugccucccggaguguucagccaccucaccgcccugcggggccugucccuuaauucuaacagacugaccguccucagccauaaugaccugcccgcuaaccucgagauucuggacaucucccgcaaucagcuucuggcgccuaacccggauguguuuguuagccucucugugcuggacauuacacacaauaaauucaucugugaaugcgagcuguccacguuuauuaacuggcuuaaucacaccaacgucacaaucgccgggcccccugcugauauuuacuguguguaccccgacagcuucucuggcgucucccuguuuagccucucuaccgaaggaugcgaugaggaggaagugcuuaagagccucaaguucucccuguucuuuguuuguacagugacccuuacgcuguuccucaugacaauccugaccgucaccaaauuucggggcuucugcuuuaucugcuauaagacagcccagagacugguguucaaagaccauccucaagggaccgagcccgauauguacaaguaugacgccuaccuuuguuuuagcucuaaagauuucacauggguucagaaugcucugcucaagcaccuggacacgcaguauuccgaucagaaccgcuuuaaccucugcuucgaggaacgggacuuugugccgggagaaaauagaauugccaacauccaagaugcgauuuggaauagccgcaagaucgucugucuggugucccggcauuuccuuagagacggcuggugccuggaggcuuucucuuacgcccaggggcgcugucugagcgaccucaacuccgcccugauuauggugguugucggcucucuuagccaguaucagcugaugaaacaccaauccauccggggauuugugcagaagcagcaauaccucagauggccugaggaucugcaggacgugggcugguuccuccacaaacugucucagcagauccuuaagaaagaaaaggagaagaaaaaggauaauaacauuccccugcaaaccgucgcuacaaucagcuga

SEQ ID NO: 9620 - protein, 858 aa, Artificial Sequence [sequence omitted]

SEQ ID NO: 9621 - RNA, 2577 nt, Artificial Sequence
  TLR5__Homo_sapiens__AAZ17466
augggagaccaccuggaccuucuccuaggaguggugcucauggccgguccuguguuuggaauuccuuccugcuccuuugauggccgaauagccuuuuaucguuucugcaaccucacccaggucccccagguccucaacaccacugagaggcuccugcugagcuucaacuauaucaggacagucacugcuucauccuuccccuuucuggaacagcugcagcugcuggagcucgggagccaguauacccccuugacuauugacaaggaggccuucagaaaccugcccaaccuuagaaucuuggaccugggaaguaguaagauauacuucuugcauccagaugcuuuucagggacuguuccaucuguuugaacuuagacuguauuucuguggucucucugaugcuguauugaaagaugguuauuucagaaauuuaaaggcuuuaacucgcuuggaucuauccaaaaaucagauucguagccuuuaccuucauccuucauuugggaaguugaauuccuuaaaguccauagauuuuuccuccaacaaaauauuccuuguaugugaacaugagcucgagccccuacaagggaaaacgcucuccuuuuuuagccucgcagcuaauagcuuguauagcagagucucaguggacuggggaaaauguaugaacccauucagaaacauggugcuggagauacuagauguuucuggaaauggcuggacaguggacaucacaggaaacuuuagcaaugccaucagcaaaagccaggccuucucuuugauucuugcccaccacaucaugggugccggguuuggcuuccauaacaucaaagauccugaccagaacacauuugcuggccuggccagaaguucagugagacaccuggaucuuucacauggguuugucuucucccugaacucacgagucuuugagacacucaaggauuugaagguucugaaccuugccuacaacaagauaaauaagauugcagaugaagcauuuuacggacuugacaaccuccaaguucucaauuugucauauaaccuucugggggaacuuuacaguucgaauuucuauggacuaccuaagguagccuacauugauuugcaaaagaaucacauugcaauaauucaagaccaaacauucaaauuccuggaaaaauuacagaccuuggaucuccgagacaaugcucuuacaaccauucauuuuauuccaagcauacccgauaucuucuugaguggcaauaaacuagugacuuugccaaagaucaaccuuacagcgaaccucauccacuuaucagaaaacaggcuagaaaaucuagauauucucuacuuucuccuacggguaccucaucuccagauucucauuuuaaaucaaaaucgcuucuccuccuguaguggagaucaaaccccuucagagaaucccagcuuagaacagcuuuuccuuggagaaaauauguugcaacuugccugggaaacugagcucuguugggauguuuuugagggacuuucucaucuucaaguucuguauuugaaucauaacuaucuuaauucccuuccaccaggaguauuuagccaucugacugcauuaaggggacuaagccucaacuccaacaggcugacaguucuuucucacaaugauuuaccugcuaauuuagagauccuggacauauccaggaaccagcuccuagcuccuaauccugauguauuuguaucacuuagugucuuggauauaacucauaacaaguucauuugugaaugugaacuuagcacuuuuaucaauuggcuuaaucacaccaaugucacuauagcugggccuccugcagacauauauuguguguacccugacucgcucucugggguuucccucuucucucuuuccacggaagguugugaugaagaggaagucuuaaagucccuaaaguucucccuuuucuuuguaugcacugucacucugacucuguuccucaugaccauccucacagucacaaaguuccggggcuucuguuuuaucuguuauaagacagcccagagacugguguucaaggaccauccccagggcacagaaccugauauguacaaauaugaugccuauuugugcuucagcagcaaagacuucacaugggugcagaaugcuuugcucaaacaccuggacacucaauacagugaccaaaacagauucaaccugugcuuugaagaaagagacuuugucccaggagaaaaccgcauugccaauauccaggaugccaucuggaacaguagaaagaucguuugucuugugagcagacacuuccuuagagauggcuggugccuugaagccuucaguuaugcccagggcaggugcuuaucugaccuuaacagugcucucaucaugguggugguuggguccuugucccaguaccaguugaugaaacaucaauccaucagaggcuuuguacagaaacagcaguauuugagguggccugaggaucuccaggauguuggcugguuucuucauaaacucucucaacagauacuaaagaaagaaaaagaaaagaagaaagacaauaacauuccguugcaaacuguagcaaccaucuccuaa

SEQ ID NO: 9622 - RNA, 2577 nt, Artificial Sequence
  derived and/or modified sequence opt1 from TLR5__Homo_sapiens__AAZ17466
augggcgaccaccuggaccuccugcugggggugguccucauggccggccccguguucgggaucccgagcugcuccuucgacggccgcaucgccuucuaccgguucugcaaccugacccaggugccccagguccugaacaccacggagcgccuccugcugagcuucaacuacauccggaccgugaccgcguccagcuuccccuuccucgagcagcugcagcugcucgagcuggggucccaguacacgccccugaccaucgacaaggaggccuuccgcaaccucccgaaccugcggauccuggaccucggcagcuccaagaucuacuuccugcaccccgacgccuuccagggccuguuccaccucuucgagcugcgccuguacuucugcgggcucagcgacgccgugcugaaggacggcuacuuccggaaccugaaggcccucacccgccuggaccuguccaagaaccagauccggagccucuaccugcaccccuccuucgggaagcugaacagccucaaguccaucgacuucagcuccaacaagaucuuccuggucugcgagcacgagcuggagccccuccagggcaagacccugagcuucuucucccuggcggccaacagccucuacucccgcgugagcguggacugggggaagugcaugaacccguuccggaacaugguccuggagauccuggacgugagcggcaacggcuggaccguggacaucacggggaacuucuccaacgccaucagcaagucccaggccuucagccucauccuggcgcaccacaucaugggcgccggguucggcuuccacaacaucaaggaccccgaccagaacaccuucgccggccuggcccgcuccagcguccggcaccucgaccugucccacggguucguguucagccugaacucccgcguguucgagacccucaaggaccugaagguccugaaccuggccuacaacaagaucaacaagaucgcggacgaggccuucuacggccucgacaaccuccaggugcugaaccugagcuacaaccugcugggggagcucuacuccagcaacuucuacggccugcccaagguggccuacaucgaccugcagaagaaccacaucgccaucauccaggaccagaccuucaaguuccucgagaagcugcagacgcuggaccuccgggacaacgcccugaccaccauccacuucauccccuccaucccggacaucuuccugagcgggaacaagcucgucacccugcccaagaucaaccugacggcgaaccucauccaccuguccgagaaccgccuggagaaccucgacauccuguacuuccugcuccgggugccccaccuccagauccugauccugaaccagaaccgcuucagcuccugcagcggcgaccagacccccuccgagaacccgagccuggagcagcuguuccucggcgagaacaugcugcagcuggccugggagaccgagcucugcugggacguguucgaggggcugagccaccuccagguccuguaccugaaccacaacuaccugaacucccucccgcccggcguguucagccaccugaccgcccugcgggggcucucccugaacagcaaccgccugacggugcucucccacaacgaccugcccgccaaccuggagauccucgacaucagccggaaccagcugcuggcccccaaccccgacgucuucgugucccucagcguccuggacaucacccacaacaaguucaucugcgagugcgagcuguccaccuucaucaacuggcucaaccacaccaacgugacgaucgcgggcccgcccgccgacaucuacugcguguaccccgacagccuguccggggucagccuguucucccucagcaccgagggcugcgacgaggaggaggugcugaagucccugaaguucagccucuucuucgugugcaccgucacccugacgcuguuccucaugaccauccugaccgugaccaaguuccgcggcuucugcuucaucugcuacaagacggcccagcgccugguguucaaggaccacccccaggggaccgagcccgacauguacaaguacgacgccuaccucugcuucuccagcaaggacuucaccuggguccagaacgcccugcugaagcaccucgacacccaguacagcgaccagaaccgguucaaccugugcuucgaggagcgcgacuucgugcccggcgagaaccggaucgcgaacauccaggacgccaucuggaacucccgcaagaucgugugccuggucagccggcacuuccuccgcgacggguggugccuggaggccuucuccuacgcccagggccggugccugagcgaccucaacuccgcgcugaucauggugguggucgggagccugucccaguaccagcucaugaagcaccagagcauccgcggcuucgugcagaagcagcaguaccugcgguggccggaggaccugcaggacgugggcugguuccuccacaagcugucccagcagauccugaagaaggagaaggagaagaagaaggacaacaacaucccccuccagacggucgccaccaucagcuga

SEQ ID NO: 9623 - RNA, 2577 nt, Artificial Sequence
  derived and/or modified sequence opt2 from TLR5__Homo_sapiens__AAZ17466
augggcgaccaccucgaccuccuccucggcgucguccucauggccggccccgucuucggcauccccuccugcuccuucgacggccgcaucgccuucuaccgcuucugcaaccucacccaggucccccagguccucaacaccaccgagcgccuccuccucuccuucaacuacauccgcaccgucaccgccuccuccuuccccuuccucgagcagcuccagcuccucgagcucggcucccaguacaccccccucaccaucgacaaggaggccuuccgcaaccuccccaaccuccgcauccucgaccucggcuccuccaagaucuacuuccuccaccccgacgccuuccagggccucuuccaccucuucgagcuccgccucuacuucugcggccucuccgacgccguccucaaggacggcuacuuccgcaaccucaaggcccucacccgccucgaccucuccaagaaccagauccgcucccucuaccuccaccccuccuucggcaagcucaacucccucaaguccaucgacuucuccuccaacaagaucuuccucgucugcgagcacgagcucgagccccuccagggcaagacccucuccuucuucucccucgccgccaacucccucuacucccgcgucuccgucgacuggggcaagugcaugaaccccuuccgcaacaugguccucgagauccucgacgucuccggcaacggcuggaccgucgacaucaccggcaacuucuccaacgccaucuccaagucccaggccuucucccucauccucgcccaccacaucaugggcgccggcuucggcuuccacaacaucaaggaccccgaccagaacaccuucgccggccucgcccgcuccuccguccgccaccucgaccucucccacggcuucgucuucucccucaacucccgcgucuucgagacccucaaggaccucaagguccucaaccucgccuacaacaagaucaacaagaucgccgacgaggccuucuacggccucgacaaccuccagguccucaaccucuccuacaaccuccucggcgagcucuacuccuccaacuucuacggccuccccaaggucgccuacaucgaccuccagaagaaccacaucgccaucauccaggaccagaccuucaaguuccucgagaagcuccagacccucgaccuccgcgacaacgcccucaccaccauccacuucauccccuccauccccgacaucuuccucuccggcaacaagcucgucacccuccccaagaucaaccucaccgccaaccucauccaccucuccgagaaccgccucgagaaccucgacauccucuacuuccuccuccgcgucccccaccuccagauccucauccucaaccagaaccgcuucuccuccugcuccggcgaccagacccccuccgagaaccccucccucgagcagcucuuccucggcgagaacaugcuccagcucgccugggagaccgagcucugcugggacgucuucgagggccucucccaccuccagguccucuaccucaaccacaacuaccucaacucccucccccccggcgucuucucccaccucaccgcccuccgcggccucucccucaacuccaaccgccucaccguccucucccacaacgaccuccccgccaaccucgagauccucgacaucucccgcaaccagcuccucgcccccaaccccgacgucuucgucucccucuccguccucgacaucacccacaacaaguucaucugcgagugcgagcucuccaccuucaucaacuggcucaaccacaccaacgucaccaucgccggcccccccgccgacaucuacugcgucuaccccgacucccucuccggcgucucccucuucucccucuccaccgagggcugcgacgaggaggagguccucaagucccucaaguucucccucuucuucgucugcaccgucacccucacccucuuccucaugaccauccucaccgucaccaaguuccgcggcuucugcuucaucugcuacaagaccgcccagcgccucgucuucaaggaccacccccagggcaccgagcccgacauguacaaguacgacgccuaccucugcuucuccuccaaggacuucaccuggguccagaacgcccuccucaagcaccucgacacccaguacuccgaccagaaccgcuucaaccucugcuucgaggagcgcgacuucguccccggcgagaaccgcaucgccaacauccaggacgccaucuggaacucccgcaagaucgucugccucgucucccgccacuuccuccgcgacggcuggugccucgaggccuucuccuacgcccagggccgcugccucuccgaccucaacuccgcccucaucauggucgucgucggcucccucucccaguaccagcucaugaagcaccaguccauccgcggcuucguccagaagcagcaguaccuccgcuggcccgaggaccuccaggacgucggcugguuccuccacaagcucucccagcagauccucaagaaggagaaggagaagaagaaggacaacaacaucccccuccagaccgucgccaccaucuccuga

SEQ ID NO: 9624 - RNA, 2577 nt, Artificial Sequence
  derived and/or modified sequence opt3 from TLR5__Homo_sapiens__AAZ17466
augggcgaccaccuggaucuccuucuggggguggucuugauggccggacccguuuucgguaucccuagcugcuccuuugacggcagaauugcuuucuacagguuuuguaacuuaacccaggugccacaaguacugaauacaacugagcggcuacuccugucuuucaacuauauacgcacggugaccgcaucaaguuuuccguuccuugaacagcugcaguugcucgagcuggggagccaguacacaccccugacuaucgauaaggaagccuuucgaaaucucccuaacuuacguauucuggaccuuggauccucuaaaaucuauuucuugcauccagaugcguuucaaggccuguuccaccuauuugagcucagacuguacuucugcggucuuucggacgcuguccugaaggauggguauuuuaggaauuugaaagcccucacccggcuggacuuaucaaagaaccagauucgcagccuguaccuccaucccaguuucggaaaacuuaauucccugaagucuaucgauuucagcuccaacaagauauuuuuggugugugaacacgagcuagagccucugcagggcaaaacacucucauucuuuagucuggcagccaauagccuuuauucuagaguuuccguggacuggggcaagugcaugaacccauucaggaauaugguccuggaaaucuuggaugugucagggaacggauggaccguagacauuacugguaauuuuagcaacgcuaucaguaaaucucaggcauucucccucauucuggcccaucacaucaugggcgcuggguuuggauuccacaauauaaaggaucccgaccaaaacacauuugccggcuuagcgcggagcucgguucgccaucuggaccuaucucacgguuucguguuuucccucaacucacgagucuucgagacccugaaagaucuuaagguguugaaucuggcauacaacaagauuaauaaaaucgccgacgaggcuuuuuacgggcucgauaaccuucaggugcugaaucugaguuauaacuugcucggagaacuguacagcuccaauuucuauggcuuaccuaaggucgccuacauugaccugcagaaaaaccauaucgcaaucauucaggaucaaacguucaaguuucuagagaaacuccagacucuggaccuuagagauaaugcuuugaccacaauacacuucaucccaucuauuccggacaucuuucugagcggcaacaagcucguuacucugcccaaaauaaauuuaaccgccaaccugauucaccuuucagaaaauagguuggagaaccucgauauccuguauuuccuacugcgggugccucaucuccagauccugauucuuaaucaaaaccguuuuaguuccuguagcggggaccagacaccaucugaaaaccccucauuggagcagcuguucuuaggagaaaauaugcuccagcuggcgugggagaccgagcuuugcugggauguauuugaaggucugagucacuugcaagugcucuaccugaaccauaauuaucuaaacagccugccuccaggcgucuucucccaccucacggcccugcgcgggcuuucuuugaacucgaauagacugacuguguuaagccauaaugaccuccccgcaaaccuggagauccuugacauuuccaggaaucagcugcuagcuccgaacccugauguuuuugugucacucaguguccuggacauaacacacaauaaguucaucugugaaugcgaguugucuaccuuuauuaacuggcugaaucacacuaacgugacaaucgccggacccccagcugauaucuacuguguauacccugacagcuuauccggcguuucacucuucagccugucuaccgaagguugcgaugaggaggaagugcuuaagucccugaaauuuaguuuguucuucgucuguacggugacccucacacuguuucuaaugacuauucugaccgucacaaaguuccggggguuuugcuucauaugcuauaaaacugcccagcgacuuguguuuaaggaccauccccagggcaccgagccagauauguacaaauaugacgcauaccucuguuucagcucuaaggauuuuacauggguucaaaaugcccuguugaagcaccuggacacccaguauuccgaucagaaccgcuucaacuuaugcuuugaagagagagacuucgugcccggagaaaauaggaucgcuaacauucaggaugcgaucuggaauagucggaaaauuguaugucucgucucacgccauuuucugagagacggcuggugccuugaggcauucagcuacgcccaagggaggugucugucggacuugaacuccgcucucaucauggugguugugggaucucugagccaguaucagcuaaugaagcaccagucaauacgugguuucguccaaaaacagcaguaccugcgguggccugaggaucuucaagacgugggcugguuucuccacaagcugagucagcagaucuugaaaaaggaaaaggagaaaaagaaagauaauaacauuccauuacagacuguagccacgaucuccuga

SEQ ID NO: 9625 - RNA, 2577 nt, Artificial Sequence
  derived and/or modified sequence opt4 from TLR5__Homo_sapiens__AAZ17466
augggcgaccaccuggaccugcugcugggcguggugcugauggccggccccguguucggcauccccagcugcagcuucgacggcagaaucgccuucuacagauucugcaaccugacccaggugccccaggugcugaacaccaccgagagacugcugcugagcuucaacuacaucagaaccgugaccgccagcagcuuccccuuccuggagcagcugcagcugcuggagcugggcagccaguacaccccccugaccaucgacaaggaggccuucagaaaccugcccaaccugagaauccuggaccugggcagcagcaagaucuacuuccugcaccccgacgccuuccagggccuguuccaccuguucgagcugagacuguacuucugcggccugagcgacgccgugcugaaggacggcuacuucagaaaccugaaggcccugaccagacuggaccugagcaagaaccagaucagaagccuguaccugcaccccagcuucggcaagcugaacagccugaagagcaucgacuucagcagcaacaagaucuuccuggugugcgagcacgagcuggagccccugcagggcaagacccugagcuucuucagccuggccgccaacagccuguacagcagagugagcguggacuggggcaagugcaugaaccccuucagaaacauggugcuggagauccuggacgugagcggcaacggcuggaccguggacaucaccggcaacuucagcaacgccaucagcaagagccaggccuucagccugauccuggcccaccacaucaugggcgccggcuucggcuuccacaacaucaaggaccccgaccagaacaccuucgccggccuggccagaagcagcgugagacaccuggaccugagccacggcuucguguucagccugaacagcagaguguucgagacccugaaggaccugaaggugcugaaccuggccuacaacaagaucaacaagaucgccgacgaggccuucuacggccuggacaaccugcaggugcugaaccugagcuacaaccugcugggcgagcuguacagcagcaacuucuacggccugcccaagguggccuacaucgaccugcagaagaaccacaucgccaucauccaggaccagaccuucaaguuccuggagaagcugcagacccuggaccugagagacaacgcccugaccaccauccacuucauccccagcauccccgacaucuuccugagcggcaacaagcuggugacccugcccaagaucaaccugaccgccaaccugauccaccugagcgagaacagacuggagaaccuggacauccuguacuuccugcugagagugccccaccugcagauccugauccugaaccagaacagauucagcagcugcagcggcgaccagacccccagcgagaaccccagccuggagcagcuguuccugggcgagaacaugcugcagcuggccugggagaccgagcugugcugggacguguucgagggccugagccaccugcaggugcuguaccugaaccacaacuaccugaacagccugccccccggcguguucagccaccugaccgcccugagaggccugagccugaacagcaacagacugaccgugcugagccacaacgaccugcccgccaaccuggagauccuggacaucagcagaaaccagcugcuggcccccaaccccgacguguucgugagccugagcgugcuggacaucacccacaacaaguucaucugcgagugcgagcugagcaccuucaucaacuggcugaaccacaccaacgugaccaucgccggcccccccgccgacaucuacugcguguaccccgacagccugagcggcgugagccuguucagccugagcaccgagggcugcgacgaggaggaggugcugaagagccugaaguucagccuguucuucgugugcaccgugacccugacccuguuccugaugaccauccugaccgugaccaaguucagaggcuucugcuucaucugcuacaagaccgcccagagacugguguucaaggaccacccccagggcaccgagcccgacauguacaaguacgacgccuaccugugcuucagcagcaaggacuucaccugggugcagaacgcccugcugaagcaccuggacacccaguacagcgaccagaacagauucaaccugugcuucgaggagagagacuucgugcccggcgagaacagaaucgccaacauccaggacgccaucuggaacagcagaaagaucgugugccuggugagcagacacuuccugagagacggcuggugccuggaggccuucagcuacgcccagggcagaugccugagcgaccugaacagcgcccugaucauggugguggugggcagccugagccaguaccagcugaugaagcaccagagcaucagaggcuucgugcagaagcagcaguaccugagauggcccgaggaccugcaggacgugggcugguuccugcacaagcugagccagcagauccugaagaaggagaaggagaagaagaaggacaacaacaucccccugcagaccguggccaccaucagcuga

SEQ ID NO: 9626 - RNA, 2577 nt, Artificial Sequence
  derived and/or modified sequence opt5 from TLR5__Homo_sapiens__AAZ17466
augggcgaccaccuggaucuccugcuuggggugguccugauggccggacccguuuucggcaucccuagcugcuccuuugacgggagaauugcuuucuaccgguuuuguaaccucacccaggugccgcaagugcugaauacaacggagcgccuucugcucucuuucaacuauaucagaaccgucacagccagcuccuuucccuuccuggaacagcugcagcuccuggagcuuggaucucaguacaccccucugacaauugauaaggaagcguuucggaaucuccccaaccugcgcauccuugaccugggcagcuccaaaauuuauuuccuccauccugaugcuuuucaagggcuguuccaccuguuugagcucagacuguacuucugcggacuuucugacgccgugcugaaggauggcuauuuucggaaucucaaagcccugacccgccuugaccugagcaagaaccagaucagaucccucuaccugcaucccagcuucggcaaacucaauucucucaaguccaucgauuucagcucuaacaagauuuuucugguuugugaacacgagcuugagccucugcaggggaaaacacucuccuucuuuagccuggcugccaauucucuuuauucccgggugagcgucgacuggggaaagugcaugaacccguuccgcaauauggugcuggaaauccucgauguuuccggcaacggguggaccguggacauuacgggaaauuuuucuaacgcuaucagcaaaucccaggccuucagccugauucuggcgcaucacaucaugggcgccggguuuggauuccacaauauuaaggaucccgaccaaaacaccuuugcuggccucgccagaucuuccguccggcaucuggaccuuagccacggcuucguguuuucucugaacagccgcguguucgagacacucaaagaucugaagguccugaaucuugcuuacaacaagaucaauaaaaucgccgacgaagcguuuuacgggcucgauaaccugcagguucugaaucucuccuauaaccugcuuggagagcuguacucuagcaauuucuauggccucccuaagguggccuacauugaccugcagaaaaaccauaucgcuauuauccaggaucaaaccuucaaguuucuggagaaacuucagacacucgaccugagagauaaugcccugaccacgauucacuucauccccuccaucccugacauuuuucucagcgggaacaagcuggugacacuucccaaaaucaaucugaccgcuaaccucauucaccugucugaaaaucggcuggagaaccuugauauccucuauuuccugcugcgcgucccgcaucuccagauucugauccuuaaucaaaacagauuuuccagcuguucuggagaccagacaccuuccgaaaaccccagccuggagcagcuguuccugggcgaaaauaugcugcagcuugccugggagaccgagcucugcugggauguguuugaagggcugucccaccuucaaguucucuaccugaaccauaauuaucuuaacucucugccucccggaguguucagccaccucaccgcccugcggggccugucccuuaauucuaacagacugacaguccucagccauaaugaccugcccgcuaaccucgagauccuggacauuucccgcaaucagcuucuggcgccuaacccggauguguuuguuagccucucugugcuggacaucacgcacaauaaguucauuugugaaugcgagcuguccaccuuuaucaacuggcuuaaucacacaaacgucaccauugccgggcccccugcugauaucuacuguguguaccccgacagccugucuggcgucucccucuucagccugucuacagaaggaugcgaugaggaggaagugcucaagagccugaaauuuucccuuuucuucguuuguaccgugacgcugacacucuuucugaugaccauucugaccgucacaaaguuccggggcuuuugcuucaucugcuauaaaaccgcccagagacuuguguuuaaggaccauccucaggggacagagcccgauauguacaaauaugacgccuaccuguguuucagcucuaaggauuuuacguggguucaaaaugcucuccugaagcaccucgacacccaguauuccgaucagaaccgcuucaaccugugcuuugaggaacgggacuucgugccgggagaaaauagaaucgccaacauucaggaugcgaucuggaauagccgcaaaauugucugucuugugucccggcauuuucugagagacggcuggugccuggaggcuuucucuuacgcccaagggcgcugucucagcgaccugaacuccgcccuuaucauggugguugucggcucucugagccaguaucagcucaugaagcaccaguccauucggggauucgugcaaaaacagcaguaccugagauggccugaggaucuccaagacgugggcugguuucugcacaagcugucucagcagauccugaaaaaggaaaaggagaaaaagaaagauaauaacaucccccugcagacagucgcuaccauuagcuga

SEQ ID NO: 9627 - protein, 858 aa, Artificial Sequence [sequence omitted]

SEQ ID NO: 9628 - RNA, 2577 nt, Artificial Sequence
  TLR5__Homo_sapiens__AAZ17467
augggagaccaccuggaccuucuccuaggaguggugcucauggccgguccuguguuuggaauuccuuccugcuccuuugauggccgaauagccuuuuaucguuucugcaaccucacccaggucccccagguccucaacaccacugagaggcuccugcugagcuucaacuauaucaggacagucacugcuucauccuuccccuuucuggaacagcugcagcugcuggagcucgggagccaguauacccccuugacuauugacaaggaggccuucagaaaccugcccaaccuuagaaucuuggaccugggaaguaguaagauauacuucuugcauccagaugcuuuucagggacuguuccaucuguuugaacuuagacuguauuucuguggucucucugaugcuguauugaaagaugguuauuucagaaauuuaaaggcuuuaacucgcuuggaucuauccaaaaaucagauucguagccuuuaccuucauccuucauuugggaaguugaauuccuuaaaguccauagauuuuuccuccaaccaaauauuccuuguaugugaacaugagcucgagccccuacaagggaaaacgcucuccuuuuuuagccucgcagcuaauagcuuguauagcagagucucaguggacuggggaaaauguaugaacccauucagaaacauggugcuggagauacuagauguuucuggaaauggcuggacaguggacaucacaggaaacuuuagcaaugccaucagcaaaagccaggccuucucuuugauucuugcccaccacaucaugggugccggguuuggcuuccauaacaucaaagauccugaccagaacacauuugcuggccuggccagaaguucagugagacaccuggaucuuucacauggguuugucuucucccugaacucacgagucuuugagacacucaaggauuugaagguucugaaccuugccuacaacaagauaaauaagauugcagaugaagcauuuuacggacuugacaaccuccaaguucucaauuugucauauaaccuucugggggaacuuuacaguucgaauuucuauggacuaccuaagguagccuacauugauuugcaaaagaaucacauugcaauaauucaagaccaaacauucaaauuccuggaaaaauuacagaccuuggaucuccgagacaaugcucuuacaaccauucauuuuauuccaagcauacccgauaucuucuugaguggcaauaaacuagugacuuugccaaagaucaaccuuacagcgaaccucauccacuuaucagaaaacaggcuagaaaaucuagauauucucuacuuucuccuacggguaccucaucuccagauucucauuuuaaaucaaaaucgcuucuccuccuguaguggagaucaaaccccuucagagaaucccagcuuagaacagcuuuuccuuggagaaaauauauugcaaauugccugggaaacugagcucuguugggauguuuuugagggacuuucucaucuucaaguucuguauuugaaucauaacuaucuuaauucccuuccaccaggaguauuuagccaucugacugcauuaaggggacuaagccucaacuccaacaggcugacaguucuuucucacaaugauuuaccugcuaauuuagagauccuggacauauccaggaaccagcuccuagcuccuaauccugauguauuuguaucacuuagugucuuggauauaacucauaacaaguucauuugugaaugugaacuuagcacuuuuaucaauuggcuuaaucacaccaaugucacuauagcugggccuccugcagacauauauuguguguacccugacucgcucucugggguuucccucuucucucuuuccacggaagguugugaugaagaggaagucuuaaagucccuaaaguucucccuuuucuuuguaugcacugucacucugacucuguuccucaugaccauccucacagucacaaaguuccggggcuucuguuuuaucuguuauaagacagcccagagacugguguucaaggaccauccccagggcacagaaccugauauguacaaauaugaugccuauuugugcuucagcagcaaagacuucacaugggugcagaaugcuuugcucaaacaccuggacacucaauacagugaccaaaacagauucaaccugugcuuugaagaaagagacuuugucccaggagaaaaccgcauugccaauauccaggaugccaucuggaacaguagaaagaucguuugucuugugagcagacacuuccuuagagauggcuggugccuugaagccuucaguuaugcccagggcaggugcuuaucugaccuuaacagugcucucaucaugguggugguuggguccuugucccaguaccaguugaugaaacaucaauccaucagaggcuuuguacagaaacagcaguauuugagguggccugaggaucuccaggauguuggcugguuucuucauaagcucucucaacagauacuaaagaaagaaaaagaaaagaagaaaggcaauaacauuccguugcaaacuguagcaaccaucuccuaa

SEQ ID NO: 9629 - RNA, 2577 nt, Artificial Sequence
  derived and/or modified sequence opt1 from TLR5__Homo_sapiens__AAZ17467
augggcgaccaccuggaccuccugcugggggugguccucauggccggccccguguucgggaucccgagcugcuccuucgacggccgcaucgccuucuaccgguucugcaaccugacccaggugccccagguccugaacaccacggagcgccuccugcugagcuucaacuacauccggaccgugaccgcguccagcuuccccuuccucgagcagcugcagcugcucgagcuggggucccaguacacgccccugaccaucgacaaggaggccuuccgcaaccucccgaaccugcggauccuggaccucggcagcuccaagaucuacuuccugcaccccgacgccuuccagggccuguuccaccucuucgagcugcgccuguacuucugcgggcucagcgacgccgugcugaaggacggcuacuuccggaaccugaaggcccucacccgccuggaccuguccaagaaccagauccggagccucuaccugcaccccuccuucgggaagcugaacagccucaaguccaucgacuucagcuccaaccagaucuuccuggucugcgagcacgagcuggagccccuccagggcaagacccugagcuucuucucccuggcggccaacagccucuacucccgcgugagcguggacugggggaagugcaugaacccguuccggaacaugguccuggagauccuggacgugagcggcaacggcuggaccguggacaucacggggaacuucuccaacgccaucagcaagucccaggccuucagccucauccuggcgcaccacaucaugggcgccggguucggcuuccacaacaucaaggaccccgaccagaacaccuucgccggccuggcccgcuccagcguccggcaccucgaccugucccacggguucguguucagccugaacucccgcguguucgagacccucaaggaccugaagguccugaaccuggccuacaacaagaucaacaagaucgcggacgaggccuucuacggccucgacaaccuccaggugcugaaccugagcuacaaccugcugggggagcucuacuccagcaacuucuacggccugcccaagguggccuacaucgaccugcagaagaaccacaucgccaucauccaggaccagaccuucaaguuccucgagaagcugcagacgcuggaccuccgggacaacgcccugaccaccauccacuucauccccuccaucccggacaucuuccugagcgggaacaagcucgucacccugcccaagaucaaccugacggcgaaccucauccaccuguccgagaaccgccuggagaaccucgacauccuguacuuccugcuccgggugccccaccuccagauccugauccugaaccagaaccgcuucagcuccugcagcggcgaccagacccccuccgagaacccgagccuggagcagcuguuccucggcgagaacauccugcagaucgccugggagaccgagcugugcugggacguguucgaggggcucagccaccuccagguccuguaccugaaccacaacuaccugaacucccugccgcccggcguguucagccaccucaccgcccugcgggggcugucccucaacagcaaccgccugacggugcugucccacaacgaccuccccgccaaccuggagauccuggacaucagccggaaccagcuccuggcccccaaccccgacgucuucgugucccugagcguccucgacaucacccacaacaaguucaucugcgagugcgagcuguccaccuucaucaacuggcugaaccacaccaacgugacgaucgcgggcccgcccgccgacaucuacugcguguaccccgacagccucuccggggucagccuguucucccugagcaccgagggcugcgacgaggaggaggugcucaagucccugaaguucagccuguucuucgugugcaccgucacccucacgcuguuccugaugaccauccucaccgugaccaaguuccgcggcuucugcuucaucugcuacaagacggcccagcgccugguguucaaggaccacccccaggggaccgagcccgacauguacaaguacgacgccuaccugugcuucuccagcaaggacuucaccuggguccagaacgcccuccugaagcaccuggacacccaguacagcgaccagaaccgguucaaccucugcuucgaggagcgcgacuucgugcccggcgagaaccggaucgcgaacauccaggacgccaucuggaacucccgcaagaucgugugccuggucagccggcacuuccugcgcgacggguggugccucgaggccuucuccuacgcccagggccggugccugagcgaccugaacuccgcgcucaucauggugguggucgggagccugucccaguaccagcugaugaagcaccagagcauccgcggcuucgugcagaagcagcaguaccuccgguggccggaggaccugcaggacgugggcugguuccugcacaagcucucccagcagauccugaagaaggagaaggagaagaagaaggggaacaacaucccccugcagacggucgccaccaucagcuga

SEQ ID NO: 9630 - RNA, 2577 nt, Artificial Sequence
  derived and/or modified sequence opt2 from TLR5__Homo_sapiens__AAZ17467
augggcgaccaccucgaccuccuccucggcgucguccucauggccggccccgucuucggcauccccuccugcuccuucgacggccgcaucgccuucuaccgcuucugcaaccucacccaggucccccagguccucaacaccaccgagcgccuccuccucuccuucaacuacauccgcaccgucaccgccuccuccuuccccuuccucgagcagcuccagcuccucgagcucggcucccaguacaccccccucaccaucgacaaggaggccuuccgcaaccuccccaaccuccgcauccucgaccucggcuccuccaagaucuacuuccuccaccccgacgccuuccagggccucuuccaccucuucgagcuccgccucuacuucugcggccucuccgacgccguccucaaggacggcuacuuccgcaaccucaaggcccucacccgccucgaccucuccaagaaccagauccgcucccucuaccuccaccccuccuucggcaagcucaacucccucaaguccaucgacuucuccuccaaccagaucuuccucgucugcgagcacgagcucgagccccuccagggcaagacccucuccuucuucucccucgccgccaacucccucuacucccgcgucuccgucgacuggggcaagugcaugaaccccuuccgcaacaugguccucgagauccucgacgucuccggcaacggcuggaccgucgacaucaccggcaacuucuccaacgccaucuccaagucccaggccuucucccucauccucgcccaccacaucaugggcgccggcuucggcuuccacaacaucaaggaccccgaccagaacaccuucgccggccucgcccgcuccuccguccgccaccucgaccucucccacggcuucgucuucucccucaacucccgcgucuucgagacccucaaggaccucaagguccucaaccucgccuacaacaagaucaacaagaucgccgacgaggccuucuacggccucgacaaccuccagguccucaaccucuccuacaaccuccucggcgagcucuacuccuccaacuucuacggccuccccaaggucgccuacaucgaccuccagaagaaccacaucgccaucauccaggaccagaccuucaaguuccucgagaagcuccagacccucgaccuccgcgacaacgcccucaccaccauccacuucauccccuccauccccgacaucuuccucuccggcaacaagcucgucacccuccccaagaucaaccucaccgccaaccucauccaccucuccgagaaccgccucgagaaccucgacauccucuacuuccuccuccgcgucccccaccuccagauccucauccucaaccagaaccgcuucuccuccugcuccggcgaccagacccccuccgagaaccccucccucgagcagcucuuccucggcgagaacauccuccagaucgccugggagaccgagcucugcugggacgucuucgagggccucucccaccuccagguccucuaccucaaccacaacuaccucaacucccucccccccggcgucuucucccaccucaccgcccuccgcggccucucccucaacuccaaccgccucaccguccucucccacaacgaccuccccgccaaccucgagauccucgacaucucccgcaaccagcuccucgcccccaaccccgacgucuucgucucccucuccguccucgacaucacccacaacaaguucaucugcgagugcgagcucuccaccuucaucaacuggcucaaccacaccaacgucaccaucgccggcccccccgccgacaucuacugcgucuaccccgacucccucuccggcgucucccucuucucccucuccaccgagggcugcgacgaggaggagguccucaagucccucaaguucucccucuucuucgucugcaccgucacccucacccucuuccucaugaccauccucaccgucaccaaguuccgcggcuucugcuucaucugcuacaagaccgcccagcgccucgucuucaaggaccacccccagggcaccgagcccgacauguacaaguacgacgccuaccucugcuucuccuccaaggacuucaccuggguccagaacgcccuccucaagcaccucgacacccaguacuccgaccagaaccgcuucaaccucugcuucgaggagcgcgacuucguccccggcgagaaccgcaucgccaacauccaggacgccaucuggaacucccgcaagaucgucugccucgucucccgccacuuccuccgcgacggcuggugccucgaggccuucuccuacgcccagggccgcugccucuccgaccucaacuccgcccucaucauggucgucgucggcucccucucccaguaccagcucaugaagcaccaguccauccgcggcuucguccagaagcagcaguaccuccgcuggcccgaggaccuccaggacgucggcugguuccuccacaagcucucccagcagauccucaagaaggagaaggagaagaagaagggcaacaacaucccccuccagaccgucgccaccaucuccuga

SEQ ID NO: 9631 - RNA, 2577 nt, Artificial Sequence
  derived and/or modified sequence opt3 from TLR5__Homo_sapiens__AAZ17467
augggcgaccaccuggaucuccuucuggggguggucuugauggccggacccguuuucgguaucccuagcugcuccuuugacggcagaauugcuuucuacagguuuuguaacuuaacccaggugccacaaguacugaauacaacugagcggcuacuccugucuuucaacuauauacgcacggugaccgcaucaaguuuuccguuccuugaacagcugcaguugcucgagcuggggagccaguacacaccccugacuaucgauaaggaagccuuucgaaaucucccuaacuuacguauucuggaccuuggauccucuaaaaucuauuucuugcauccagaugcguuucaaggccuguuccaccuauuugagcucagacuguacuucugcggucuuucggacgcuguccugaaggauggguauuuuaggaauuugaaagcccucacccggcuggacuuaucaaagaaccagauucgcagccuguaccuccaucccaguuucggaaaacuuaauucccugaagucuaucgauuucagcuccaaccagauauuuuuggugugugaacacgagcuagagccucugcagggcaagacacucucauucuuuagucuggcagccaauagccuuuauucuagaguuuccguggacuggggcaaaugcaugaacccauucaggaauaugguccuggaaaucuuggaugugucagggaacggauggaccguagacauuacugguaauuuuagcaacgcuaucaguaagucucaagcauucucccucauucuggcccaucacaucaugggcgcuggguuuggauuccacaauauaaaagaucccgaccagaacacauuugccggcuuagcgcggagcucgguucgccaucuggaccuaucucacgguuucguguuuucccucaacucacgagucuucgagacccugaaggaucuuaaaguguugaaucuggcauacaacaagauuaauaagaucgccgacgaggcuuuuuacgggcucgauaaccuucaggugcugaaucugaguuauaacuugcucggagaacuguacagcuccaauuucuauggcuuaccuaaagucgccuacauugaccugcagaagaaccauaucgcaaucauucaagaucagacguucaaauuucuagagaagcuccagacucuggaccuuagagauaaugcuuugaccacaauacacuucaucccaucuauuccggacaucuuucugagcggcaacaaacucguuacucugcccaagauaaauuuaaccgccaaccugauucaccuuucagaaaauagguuggagaaccucgauauccuguauuuccuacugcgggugccucaucuccaaauccugauucuuaaucagaaccguuuuaguuccuguagcggggaccagacaccaucugaaaaccccucauuggagcagcuguucuuaggagaaaauauccuccaaauugcgugggagaccgagcugugcugggauguauuugaaggucuuagucacuugcaagugcuguaccucaaccauaauuaucugaacagccuaccuccaggcgucuucucccaccugacggcccuccgcgggcugucucuuaauucgaacagauugacugugcugagccauaaugacuuacccgcaaaccucgagauacuggacaucuccaggaaucagcuucuggcuccgaacccugauguuuuugugucacuaaguguccucgacauuacacacaauaaauucaucugugaaugcgagcugucuaccuuuaucaacugguugaaucacacuaacgugacaauugccggacccccagcugauauauacuguguauacccugacagccuguccggcguuucauuauucagccucucuaccgaagguugcgaugaggaggaagugcugaagucccuuaaguuuagucuguucuucgucuguacggugaccuugacacucuuucugaugacuauccuaaccgucacaaaauuccggggguuuugcuucauuugcuauaagacugcccagcgacugguguuuaaagaccauccccagggcaccgagccagauauguacaaguaugacgcauaccuuuguuucagcucuaaagauuuuacauggguucagaaugcccuccugaagcacuuggacacccaguauuccgaucagaaccgcuucaaccugugcuuugaagagagagacuucgugcccggagaaaauaggaucgcuaacauucaagaugcgaucuggaauagucggaagauaguauguuuagucucacgccauuuucucagagacggcuggugccuggaggcauucagcuacgcccaggggaggugucuuucggaccugaacuccgcuuugaucauggugguugugggaucucucagccaguaucagcugaugaaacaccaaucaauucgugguuucguccagaagcagcaauaccuacgguggccugaggaucugcaggacgugggcugguuucuucacaaacucagucagcagauccugaagaaagaaaaggagaagaaaaaggggaauaacauuccauugcaaacuguagccacgaucuccuga

SEQ ID NO: 9632 - RNA, 2577 nt, Artificial Sequence
  derived and/or modified sequence opt4 from TLR5__Homo_sapiens__AAZ17467
augggcgaccaccuggaccugcugcugggcguggugcugauggccggccccguguucggcauccccagcugcagcuucgacggcagaaucgccuucuacagauucugcaaccugacccaggugccccaggugcugaacaccaccgagagacugcugcugagcuucaacuacaucagaaccgugaccgccagcagcuuccccuuccuggagcagcugcagcugcuggagcugggcagccaguacaccccccugaccaucgacaaggaggccuucagaaaccugcccaaccugagaauccuggaccugggcagcagcaagaucuacuuccugcaccccgacgccuuccagggccuguuccaccuguucgagcugagacuguacuucugcggccugagcgacgccgugcugaaggacggcuacuucagaaaccugaaggcccugaccagacuggaccugagcaagaaccagaucagaagccuguaccugcaccccagcuucggcaagcugaacagccugaagagcaucgacuucagcagcaaccagaucuuccuggugugcgagcacgagcuggagccccugcagggcaagacccugagcuucuucagccuggccgccaacagccuguacagcagagugagcguggacuggggcaagugcaugaaccccuucagaaacauggugcuggagauccuggacgugagcggcaacggcuggaccguggacaucaccggcaacuucagcaacgccaucagcaagagccaggccuucagccugauccuggcccaccacaucaugggcgccggcuucggcuuccacaacaucaaggaccccgaccagaacaccuucgccggccuggccagaagcagcgugagacaccuggaccugagccacggcuucguguucagccugaacagcagaguguucgagacccugaaggaccugaaggugcugaaccuggccuacaacaagaucaacaagaucgccgacgaggccuucuacggccuggacaaccugcaggugcugaaccugagcuacaaccugcugggcgagcuguacagcagcaacuucuacggccugcccaagguggccuacaucgaccugcagaagaaccacaucgccaucauccaggaccagaccuucaaguuccuggagaagcugcagacccuggaccugagagacaacgcccugaccaccauccacuucauccccagcauccccgacaucuuccugagcggcaacaagcuggugacccugcccaagaucaaccugaccgccaaccugauccaccugagcgagaacagacuggagaaccuggacauccuguacuuccugcugagagugccccaccugcagauccugauccugaaccagaacagauucagcagcugcagcggcgaccagacccccagcgagaaccccagccuggagcagcuguuccugggcgagaacauccugcagaucgccugggagaccgagcugugcugggacguguucgagggccugagccaccugcaggugcuguaccugaaccacaacuaccugaacagccugccccccggcguguucagccaccugaccgcccugagaggccugagccugaacagcaacagacugaccgugcugagccacaacgaccugcccgccaaccuggagauccuggacaucagcagaaaccagcugcuggcccccaaccccgacguguucgugagccugagcgugcuggacaucacccacaacaaguucaucugcgagugcgagcugagcaccuucaucaacuggcugaaccacaccaacgugaccaucgccggcccccccgccgacaucuacugcguguaccccgacagccugagcggcgugagccuguucagccugagcaccgagggcugcgacgaggaggaggugcugaagagccugaaguucagccuguucuucgugugcaccgugacccugacccuguuccugaugaccauccugaccgugaccaaguucagaggcuucugcuucaucugcuacaagaccgcccagagacugguguucaaggaccacccccagggcaccgagcccgacauguacaaguacgacgccuaccugugcuucagcagcaaggacuucaccugggugcagaacgcccugcugaagcaccuggacacccaguacagcgaccagaacagauucaaccugugcuucgaggagagagacuucgugcccggcgagaacagaaucgccaacauccaggacgccaucuggaacagcagaaagaucgugugccuggugagcagacacuuccugagagacggcuggugccuggaggccuucagcuacgcccagggcagaugccugagcgaccugaacagcgcccugaucauggugguggugggcagccugagccaguaccagcugaugaagcaccagagcaucagaggcuucgugcagaagcagcaguaccugagauggcccgaggaccugcaggacgugggcugguuccugcacaagcugagccagcagauccugaagaaggagaaggagaagaagaagggcaacaacaucccccugcagaccguggccaccaucagcuga

SEQ ID NO: 9633 - RNA, 2577 nt, Artificial Sequence
  derived and/or modified sequence opt5 from TLR5__Homo_sapiens__AAZ17467
augggcgaccaccuggaucuccugcuuggggugguccugauggccggacccguuuucggcaucccuagcugcuccuuugacgggagaauugcuuucuaccgguuuuguaaccucacccaggugccgcaagugcugaauacaacggagcgccuucugcucucuuucaacuauaucagaaccgucacagccagcuccuuucccuuccuggaacagcugcagcuccuggagcuuggaucucaguacaccccucugacaauugauaaggaagcguuucggaaucuccccaaccugcgcauccuugaccugggcagcuccaaaauuuauuuccuccauccugaugcuuuucaagggcuguuccaccuguuugagcucagacuguacuucugcggacuuucugacgccgugcugaaggauggcuauuuucggaaucucaaagcccugacccgccuugaccugagcaagaaccagaucagaucccucuaccugcaucccagcuucggcaaacucaauucucucaaguccaucgauuucagcucuaaccagauuuuucugguuugugaacacgagcuugagccucugcaggggaagacacucuccuucuuuagccuggcugccaauucucuuuauucccgggugagcgucgacuggggaaaaugcaugaacccguuccgcaauauggugcuggaaauccucgauguuuccggcaacggguggaccguggacauuacgggaaauuuuucuaacgcuaucagcaagucccaagccuucagccugauucuggcgcaucacaucaugggcgccggguuuggauuccacaauauuaaagaucccgaccagaacaccuuugcuggccucgccagaucuuccguccggcaucuggaccuuagccacggcuucguguuuucucugaacagccgcguguucgagacacucaaggaucugaaaguccugaaucuugcuuacaacaagaucaauaagaucgccgacgaagcguuuuacgggcucgauaaccugcagguucugaaucucuccuauaaccugcuuggagagcuguacucuagcaauuucuauggccucccuaaaguggccuacauugaccugcagaagaaccauaucgcuauuauccaagaucagaccuucaaauuucuggagaagcugcagacacucgaccugagagauaaugcccugaccacgauucacuucauccccuccaucccugacauuuuucucagcgggaacaaacuggugacacuucccaagaucaaucugaccgcuaaccucauucaccugucugaaaaucggcuggagaaccuugauauccucuauuuccugcugcgcgucccgcaucuccaaauucugauccuuaaucagaacagauuuuccagcuguucuggagaccagacaccuuccgaaaaccccagccuggagcagcuguuccugggcgaaaauauccugcaaauugccugggagaccgagcuuugcugggauguguuugaagggcucucccaucugcagguucuguaccucaaccacaauuaucugaacucucuuccucccggaguguucagccaccugaccgcccuccggggccugucccuuaauucuaacagacuuacaguccugagccauaaugaccuccccgcuaaccuggagauccucgacauuucccgcaaucagcugcuugcgccuaacccggauguguuuguuagccugucugugcucgacaucacgcacaauaaauucauuugugaaugcgagcuguccaccuuuaucaacuggcugaaucacacaaacgucaccauugccgggcccccugcugauaucuacuguguguaccccgacagccuuucuggcgucucccuguucagccucucuacagaaggaugcgaugaggaggaagugcucaagagccugaaguuuucccuguucuucguuuguaccgugacgcuuacacuguuucucaugaccauccugaccgucacaaaauuccggggcuuuugcuucauuugcuauaagaccgcccagagacugguguuuaaagaccauccucaagggacagagcccgauauguacaaguaugacgccuaccuuuguuucagcucuaaagauuuuacguggguucagaaugcucugcucaagcaccuggacacccaguauuccgaucagaaccgcuucaaccucugcuuugaggaacgggacuucgugccgggagaaaauagaaucgccaacauucaagaugcgaucuggaauagccgcaagauugucugucuggugucccggcauuuucuuagagacggcuggugccuggaggcuuucucuuacgcccaggggcgcugucugagcgaccucaacuccgcccugaucauggugguugucggcucucuuagccaguaucagcugaugaaacaccaauccauccggggauucgugcagaagcagcaauaccucagauggccugaggaucugcaggacgugggcugguuucuccacaaacugucucagcagauucuuaagaaagaaaaggagaagaaaaaggggaauaacaucccccugcaaacagucgcuaccauuagcuga

SEQ ID NO: 9634 - protein, 858 aa, Artificial Sequence [sequence omitted]

SEQ ID NO: 9635 - RNA, 2577 nt, Artificial Sequence
  TLR5__Homo_sapiens__AAZ17468
augggagaccaccuggaccuucuccuaggaguggugcucauggccgguccuguguuuggaauuccuuccugcuccuuugauggccgaauagccuuuuaucguuucugcaaccucacccaggucccccagguccucaacaccacugagaggcuccugcugagcuucaacuauaucaggacagucacugcuucauccuuccccuuucuggaacagcugcagcugcuggagcucgggagccaguauacccccuugacuauugacaaggaggccuucagaaaccugcccaaccuuagaaucuuggaccugggaaguaguaagauauacuucuugcauccagaugcuuuucagggacuguuccaucuguuugaacuuagacuguauuucuguggucucucugaugcuguauugaaagaugguuauuucagaaauuuaaaggcuuuaacucgcuuggaucuauccaaaaaucagauucguagccuuuaccuucauccuucauuugggaaguugaauuccuuaaaguccauagauuuuuccuccaaccaaauauuccuuguaugugaacaugagcucgagccccuacaagggaaaacgcucuccuuuuuuagccucgcagcuaauagcuuguauagcagagucucaguggacuggggaaaauguaugaacccauucagaaacauggugcuggagauacuagauguuucuggaaauggcuggacaguggacaucacaggaaacuuuagcaaugccaucagcaaaagccaggccuucucuuugauucuugcccaccacaucaugggugccggguuuggcuuccauaacaucaaagauccugaccagaacacauuugcuggccuggccagaaguucagugagacaccuggaucuuucacauggguuugucuucucccugaacucacgagucuuugagacacucaaggauuugaagguucugaaccuugccuacaacaagauaaauaagauugcagaugaagcauuuuacggacuugacaaccuccaaguucucaauuugucauauaaccuucugggggaacuuuacaguucgaauuucuauggacuaccuaagguagccuacauugauuugcaaaagaaucacauugcaauaauucaagaccaaacauucaaauuccuggaaaaauuacagaccuuggaucuccgagacaaugcucuuacaaccauucauuuuauuccaagcauacccgauaucuucuugaguggcaauaaacuagugacuuugccaaagaucaaccuuacagcgaaccucauccacuuaucagaaaacaggcuagaaaaucuagauauucucuacuuucuccuacggguaccucaucuccagauucucauuuuaaaucaaaaucgcuucuccuccuguaguggagaucaaaccccuucagagaaucccagcuuagaacagcuuuuccuuggagaaaauauguugcaacuugccugggaaacugagcucuguugggauguuuuugagggacuuucucaucuucaaguucuguauuugaaucauaacuaucuuaauucccuuccaccaggaguauuuagccaucugacugcauuaaggggacuaagccucaacuccaacaggcugacaguucuuucucacaaugauuuaccugcuaauuuagagauccuggacauauccaggaaccagcuccuagcuccuaauccugauguauuuguaucacuuagugucuuggauauaacucauaacaaguucauuugugaaugugaacuuagcacuuuuaucaauuggcuuaaucacaccaaugucacuauagcugggccuccugcagacauauauuguguguacccugacucgcucucugggguuucccucuucucucuuuccacggaagguugugaugaagaggaagucuuaaagucccuaaaguucucccuuuucauuguaugcacugucacucugacucuguuccucaugaccauccucacagucacaaaguuccggggcuucuguuuuaucuguuauaagacagcccagagacugguguucaaggaccauccccagggcacagaaccugauauguacaaauaugaugccuauuugugcuucagcagcaaagacuucacaugggugcagaaugcuuugcucaaacaccuggacacucaauacagugaccaaaacagauucaaccugugcuuugaagaaagagacuuugucccaggagaaaaccgcauugccaauauccaggaugccaucuggaacaguagaaagaucguuugucuugugagcagacacuuccuuagagauggcuggugccuugaagccuucaguuaugcccagggcaggugcuuaucugaccuuaacagugcucucaucaugguggugguuggguccuugucccaguaccaguugaugaaacaucaauccaucagaggcuuuguacagaaacagcaguauuugagguggccugaggaucuccaggauguuggcugguuucuucauaaacucucucaacagauacuaaagaaagaaaaagaaaagaagaaagacaauaacauuccguugcaaacuguagcaaccaucuccuaa

SEQ ID NO: 9636 - RNA, 2577 nt, Artificial Sequence
  derived and/or modified sequence opt1 from TLR5__Homo_sapiens__AAZ17468
augggcgaccaccuggaccuccugcugggggugguccucauggccggccccguguucgggaucccgagcugcuccuucgacggccgcaucgccuucuaccgguucugcaaccugacccaggugccccagguccugaacaccacggagcgccuccugcugagcuucaacuacauccggaccgugaccgcguccagcuuccccuuccucgagcagcugcagcugcucgagcuggggucccaguacacgccccugaccaucgacaaggaggccuuccgcaaccucccgaaccugcggauccuggaccucggcagcuccaagaucuacuuccugcaccccgacgccuuccagggccuguuccaccucuucgagcugcgccuguacuucugcgggcucagcgacgccgugcugaaggacggcuacuuccggaaccugaaggcccucacccgccuggaccuguccaagaaccagauccggagccucuaccugcaccccuccuucgggaagcugaacagccucaaguccaucgacuucagcuccaaccagaucuuccuggucugcgagcacgagcuggagccccuccagggcaagacccugagcuucuucucccuggcggccaacagccucuacucccgcgugagcguggacugggggaagugcaugaacccguuccggaacaugguccuggagauccuggacgugagcggcaacggcuggaccguggacaucacggggaacuucuccaacgccaucagcaagucccaggccuucagccucauccuggcgcaccacaucaugggcgccggguucggcuuccacaacaucaaggaccccgaccagaacaccuucgccggccuggcccgcuccagcguccggcaccucgaccugucccacggguucguguucagccugaacucccgcguguucgagacccucaaggaccugaagguccugaaccuggccuacaacaagaucaacaagaucgcggacgaggccuucuacggccucgacaaccuccaggugcugaaccugagcuacaaccugcugggggagcucuacuccagcaacuucuacggccugcccaagguggccuacaucgaccugcagaagaaccacaucgccaucauccaggaccagaccuucaaguuccucgagaagcugcagacgcuggaccuccgggacaacgcccugaccaccauccacuucauccccuccaucccggacaucuuccugagcgggaacaagcucgucacccugcccaagaucaaccugacggcgaaccucauccaccuguccgagaaccgccuggagaaccucgacauccuguacuuccugcuccgggugccccaccuccagauccugauccugaaccagaaccgcuucagcuccugcagcggcgaccagacccccuccgagaacccgagccuggagcagcuguuccucggcgagaacaugcugcagcuggccugggagaccgagcucugcugggacguguucgaggggcugagccaccuccagguccuguaccugaaccacaacuaccugaacucccucccgcccggcguguucagccaccugaccgcccugcgggggcucucccugaacagcaaccgccugacggugcucucccacaacgaccugcccgccaaccuggagauccucgacaucagccggaaccagcugcuggcccccaaccccgacgucuucgugucccucagcguccuggacaucacccacaacaaguucaucugcgagugcgagcuguccaccuucaucaacuggcucaaccacaccaacgugacgaucgcgggcccgcccgccgacaucuacugcguguaccccgacagccuguccggggucagccuguucucccucagcaccgagggcugcgacgaggaggaggugcugaagucccugaaguucagccucuucaucgugugcaccgucacccugacgcuguuccucaugaccauccugaccgugaccaaguuccgcggcuucugcuucaucugcuacaagacggcccagcgccugguguucaaggaccacccccaggggaccgagcccgacauguacaaguacgacgccuaccucugcuucuccagcaaggacuucaccuggguccagaacgcccugcugaagcaccucgacacccaguacagcgaccagaaccgguucaaccugugcuucgaggagcgcgacuucgugcccggcgagaaccggaucgcgaacauccaggacgccaucuggaacucccgcaagaucgugugccuggucagccggcacuuccuccgcgacggguggugccuggaggccuucuccuacgcccagggccggugccugagcgaccucaacuccgcgcugaucauggugguggucgggagccugucccaguaccagcucaugaagcaccagagcauccgcggcuucgugcagaagcagcaguaccugcgguggccggaggaccugcaggacgugggcugguuccuccacaagcugucccagcagauccugaagaaggagaaggagaagaagaaggacaacaacaucccccuccagacggucgccaccaucagcuga

SEQ ID NO: 9637 - RNA, 2577 nt, Artificial Sequence
  derived and/or modified sequence opt2 from TLR5__Homo_sapiens__AAZ17468
augggcgaccaccucgaccuccuccucggcgucguccucauggccggccccgucuucggcauccccuccugcuccuucgacggccgcaucgccuucuaccgcuucugcaaccucacccaggucccccagguccucaacaccaccgagcgccuccuccucuccuucaacuacauccgcaccgucaccgccuccuccuuccccuuccucgagcagcuccagcuccucgagcucggcucccaguacaccccccucaccaucgacaaggaggccuuccgcaaccuccccaaccuccgcauccucgaccucggcuccuccaagaucuacuuccuccaccccgacgccuuccagggccucuuccaccucuucgagcuccgccucuacuucugcggccucuccgacgccguccucaaggacggcuacuuccgcaaccucaaggcccucacccgccucgaccucuccaagaaccagauccgcucccucuaccuccaccccuccuucggcaagcucaacucccucaaguccaucgacuucuccuccaaccagaucuuccucgucugcgagcacgagcucgagccccuccagggcaagacccucuccuucuucucccucgccgccaacucccucuacucccgcgucuccgucgacuggggcaagugcaugaaccccuuccgcaacaugguccucgagauccucgacgucuccggcaacggcuggaccgucgacaucaccggcaacuucuccaacgccaucuccaagucccaggccuucucccucauccucgcccaccacaucaugggcgccggcuucggcuuccacaacaucaaggaccccgaccagaacaccuucgccggccucgcccgcuccuccguccgccaccucgaccucucccacggcuucgucuucucccucaacucccgcgucuucgagacccucaaggaccucaagguccucaaccucgccuacaacaagaucaacaagaucgccgacgaggccuucuacggccucgacaaccuccagguccucaaccucuccuacaaccuccucggcgagcucuacuccuccaacuucuacggccuccccaaggucgccuacaucgaccuccagaagaaccacaucgccaucauccaggaccagaccuucaaguuccucgagaagcuccagacccucgaccuccgcgacaacgcccucaccaccauccacuucauccccuccauccccgacaucuuccucuccggcaacaagcucgucacccuccccaagaucaaccucaccgccaaccucauccaccucuccgagaaccgccucgagaaccucgacauccucuacuuccuccuccgcgucccccaccuccagauccucauccucaaccagaaccgcuucuccuccugcuccggcgaccagacccccuccgagaaccccucccucgagcagcucuuccucggcgagaacaugcuccagcucgccugggagaccgagcucugcugggacgucuucgagggccucucccaccuccagguccucuaccucaaccacaacuaccucaacucccucccccccggcgucuucucccaccucaccgcccuccgcggccucucccucaacuccaaccgccucaccguccucucccacaacgaccuccccgccaaccucgagauccucgacaucucccgcaaccagcuccucgcccccaaccccgacgucuucgucucccucuccguccucgacaucacccacaacaaguucaucugcgagugcgagcucuccaccuucaucaacuggcucaaccacaccaacgucaccaucgccggcccccccgccgacaucuacugcgucuaccccgacucccucuccggcgucucccucuucucccucuccaccgagggcugcgacgaggaggagguccucaagucccucaaguucucccucuucaucgucugcaccgucacccucacccucuuccucaugaccauccucaccgucaccaaguuccgcggcuucugcuucaucugcuacaagaccgcccagcgccucgucuucaaggaccacccccagggcaccgagcccgacauguacaaguacgacgccuaccucugcuucuccuccaaggacuucaccuggguccagaacgcccuccucaagcaccucgacacccaguacuccgaccagaaccgcuucaaccucugcuucgaggagcgcgacuucguccccggcgagaaccgcaucgccaacauccaggacgccaucuggaacucccgcaagaucgucugccucgucucccgccacuuccuccgcgacggcuggugccucgaggccuucuccuacgcccagggccgcugccucuccgaccucaacuccgcccucaucauggucgucgucggcucccucucccaguaccagcucaugaagcaccaguccauccgcggcuucguccagaagcagcaguaccuccgcuggcccgaggaccuccaggacgucggcugguuccuccacaagcucucccagcagauccucaagaaggagaaggagaagaagaaggacaacaacaucccccuccagaccgucgccaccaucuccuga

SEQ ID NO: 9638 - RNA, 2577 nt, Artificial Sequence
  derived and/or modified sequence opt3 from TLR5__Homo_sapiens__AAZ17468
augggcgaccaccuggaucuccuucuggggguggucuugauggccggacccguuuucgguaucccuagcugcuccuuugacggcagaauugcuuucuacagguuuuguaacuuaacccaggugccacaaguacugaauacaacugagcggcuacuccugucuuucaacuauauacgcacggugaccgcaucaaguuuuccguuccuugaacagcugcaguugcucgagcuggggagccaguacacaccccugacuaucgauaaggaagccuuucgaaaucucccuaacuuacguauucuggaccuuggauccucuaaaaucuauuucuugcauccagaugcguuucaaggccuguuccaccuauuugagcucagacuguacuucugcggucuuucggacgcuguccugaaggauggguauuuuaggaauuugaaagcccucacccggcuggacuuaucaaagaaccagauucgcagccuguaccuccaucccaguuucggaaaacuuaauucccugaagucuaucgauuucagcuccaaccagauauuuuuggugugugaacacgagcuagagccucugcagggcaagacacucucauucuuuagucuggcagccaauagccuuuauucuagaguuuccguggacuggggcaaaugcaugaacccauucaggaauaugguccuggaaaucuuggaugugucagggaacggauggaccguagacauuacugguaauuuuagcaacgcuaucaguaagucucaagcauucucccucauucuggcccaucacaucaugggcgcuggguuuggauuccacaauauaaaagaucccgaccagaacacauuugccggcuuagcgcggagcucgguucgccaucuggaccuaucucacgguuucguguuuucccucaacucacgagucuucgagacccugaaggaucuuaaaguguugaaucuggcauacaacaagauuaauaagaucgccgacgaggcuuuuuacgggcucgauaaccugcaagugcuuaaucugaguuauaacuugcucggagaacuguacagcuccaauuucuauggcuuaccuaaagucgccuacauugaccugcagaagaaccauaucgcaaucauucaggaucagacguucaaauuucuagagaagcuccagacucuggaccuuagagauaaugcuuugaccacaauacacuucaucccaucuauuccggacaucuuucugagcggcaacaaacucguuacucugcccaagauaaauuuaaccgccaaccugauucaccuuucagaaaauagguuggagaaccucgauauccuguauuuccuacugcgggugccucaucuccaaauccugauucuuaaucagaaccguuuuaguuccuguagcggggaccagacaccaucugaaaaccccucauuggagcagcuguucuuaggagaaaauaugcuccaacuggcgugggagaccgagcuuugcugggauguauuugaaggucugagucaccuccagguguuguaccugaaccauaauuaucuaaacagccugccuccaggcgucuucucccaccucacggcccugcgcgggcuuucuuugaacucgaauagacugacuguguuaagccauaaugaccuccccgcaaaccuggagauccuugacauuuccaggaaucagcugcuagcuccgaacccugauguuuuugugucacucaguguccuggacauaacacacaauaaauucaucugugaaugcgaguugucuaccuuuauuaacuggcugaaucacacuaacgugacaaucgccggacccccagcugauaucuacuguguauacccugacagcuuauccggcguuucacucuucagccugucuaccgaagguugcgaugaggaggaagugcuuaagucccugaaguuuaguuuguucauugucuguacggugacccucacacuguuccuaaugacuauacugaccgucacaaaauuucggggguucugcuuuaucugcuauaagacugcccagcgacuuguguucaaagaccauccccaaggcaccgagccagauauguacaaguaugacgcauaccucuguuuuagcucuaaagauuucacauggguucagaaugcccuguugaagcaccuggacacccaguauuccgaucagaaccgcuuuaacuuaugcuucgaagagagagacuuugugcccggagaaaauaggauugcuaacauccaagaugcgauuuggaauagucggaagaucguaugucucgucucacgccauuuccugagagacggcuggugccuugaggcauuuagcuacgcccaggggaggugucugucggacuugaacuccgcucucauaauggugguugugggaucucugagccaguaucagcuaaugaaacaccaaucaauccgugguuucguccagaagcagcaauaccugcgguggccugaggaucuucaggacgugggcugguuccuccacaaacugagucagcagauuuugaagaaagaaaaggagaagaaaaaggauaauaacaucccauuacaaacuguagccacgauuuccuga

SEQ ID NO: 9639 - RNA, 2577 nt, Artificial Sequence
  derived and/or modified sequence opt4 from TLR5__Homo_sapiens__AAZ17468
augggcgaccaccuggaccugcugcugggcguggugcugauggccggccccguguucggcauccccagcugcagcuucgacggcagaaucgccuucuacagauucugcaaccugacccaggugccccaggugcugaacaccaccgagagacugcugcugagcuucaacuacaucagaaccgugaccgccagcagcuuccccuuccuggagcagcugcagcugcuggagcugggcagccaguacaccccccugaccaucgacaaggaggccuucagaaaccugcccaaccugagaauccuggaccugggcagcagcaagaucuacuuccugcaccccgacgccuuccagggccuguuccaccuguucgagcugagacuguacuucugcggccugagcgacgccgugcugaaggacggcuacuucagaaaccugaaggcccugaccagacuggaccugagcaagaaccagaucagaagccuguaccugcaccccagcuucggcaagcugaacagccugaagagcaucgacuucagcagcaaccagaucuuccuggugugcgagcacgagcuggagccccugcagggcaagacccugagcuucuucagccuggccgccaacagccuguacagcagagugagcguggacuggggcaagugcaugaaccccuucagaaacauggugcuggagauccuggacgugagcggcaacggcuggaccguggacaucaccggcaacuucagcaacgccaucagcaagagccaggccuucagccugauccuggcccaccacaucaugggcgccggcuucggcuuccacaacaucaaggaccccgaccagaacaccuucgccggccuggccagaagcagcgugagacaccuggaccugagccacggcuucguguucagccugaacagcagaguguucgagacccugaaggaccugaaggugcugaaccuggccuacaacaagaucaacaagaucgccgacgaggccuucuacggccuggacaaccugcaggugcugaaccugagcuacaaccugcugggcgagcuguacagcagcaacuucuacggccugcccaagguggccuacaucgaccugcagaagaaccacaucgccaucauccaggaccagaccuucaaguuccuggagaagcugcagacccuggaccugagagacaacgcccugaccaccauccacuucauccccagcauccccgacaucuuccugagcggcaacaagcuggugacccugcccaagaucaaccugaccgccaaccugauccaccugagcgagaacagacuggagaaccuggacauccuguacuuccugcugagagugccccaccugcagauccugauccugaaccagaacagauucagcagcugcagcggcgaccagacccccagcgagaaccccagccuggagcagcuguuccugggcgagaacaugcugcagcuggccugggagaccgagcugugcugggacguguucgagggccugagccaccugcaggugcuguaccugaaccacaacuaccugaacagccugccccccggcguguucagccaccugaccgcccugagaggccugagccugaacagcaacagacugaccgugcugagccacaacgaccugcccgccaaccuggagauccuggacaucagcagaaaccagcugcuggcccccaaccccgacguguucgugagccugagcgugcuggacaucacccacaacaaguucaucugcgagugcgagcugagcaccuucaucaacuggcugaaccacaccaacgugaccaucgccggcccccccgccgacaucuacugcguguaccccgacagccugagcggcgugagccuguucagccugagcaccgagggcugcgacgaggaggaggugcugaagagccugaaguucagccuguucaucgugugcaccgugacccugacccuguuccugaugaccauccugaccgugaccaaguucagaggcuucugcuucaucugcuacaagaccgcccagagacugguguucaaggaccacccccagggcaccgagcccgacauguacaaguacgacgccuaccugugcuucagcagcaaggacuucaccugggugcagaacgcccugcugaagcaccuggacacccaguacagcgaccagaacagauucaaccugugcuucgaggagagagacuucgugcccggcgagaacagaaucgccaacauccaggacgccaucuggaacagcagaaagaucgugugccuggugagcagacacuuccugagagacggcuggugccuggaggccuucagcuacgcccagggcagaugccugagcgaccugaacagcgcccugaucauggugguggugggcagccugagccaguaccagcugaugaagcaccagagcaucagaggcuucgugcagaagcagcaguaccugagauggcccgaggaccugcaggacgugggcugguuccugcacaagcugagccagcagauccugaagaaggagaaggagaagaagaaggacaacaacaucccccugcagaccguggccaccaucagcuga

SEQ ID NO: 9640 - RNA, 2577 nt, Artificial Sequence
  derived and/or modified sequence opt5 from TLR5__Homo_sapiens__AAZ17468
augggcgaccaccuggaucuccugcuuggggugguccugauggccggacccguuuucggcaucccuagcugcuccuuugacgggagaauugcuuucuaccgguuuuguaaccucacccaggugccgcaagugcugaauacaacggagcgccuucugcucucuuucaacuauaucagaaccgucacagccagcuccuuucccuuccuggaacagcugcagcuccuggagcuuggaucucaguacaccccucugacaauugauaaggaagcguuucggaaucuccccaaccugcgcauccuugaccugggcagcuccaaaauuuauuuccuccauccugaugcuuuucaagggcuguuccaccuguuugagcucagacuguacuucugcggacuuucugacgccgugcugaaggauggcuauuuucggaaucucaaagcccugacccgccuugaccugagcaagaaccagaucagaucccucuaccugcaucccagcuucggcaaacucaauucucucaaguccaucgauuucagcucuaaccagauuuuucugguuugugaacacgagcuugagccucugcaggggaagacacucuccuucuuuagccuggcugccaauucucuuuauucccgggugagcgucgacuggggaaaaugcaugaacccguuccgcaauauggugcuggaaauccucgauguuuccggcaacggguggaccguggacauuacgggaaauuuuucuaacgcuaucagcaagucccaagccuucagccugauucuggcgcaucacaucaugggcgccggguuuggauuccacaauauuaaagaucccgaccagaacaccuuugcuggccucgccagaucuuccguccggcaucuggaccuuagccacggcuucguguuuucucugaacagccgcguguucgagacacucaaggaucugaaaguccugaaucuugcuuacaacaagaucaauaagaucgccgacgaagcguuuuacgggcucgauaaccugcagguucugaaucucuccuauaaccugcuuggagagcuguacucuagcaauuucuauggccucccuaaaguggccuacauugaccugcagaagaaccauaucgcuauuauccaagaucagaccuucaaauuucuggagaagcugcagacacucgaccugagagauaaugcccugaccacgauucacuucauccccuccaucccugacauuuuucucagcgggaacaaacuggugacacuucccaagaucaaucugaccgcuaaccucauucaccugucugaaaaucggcuggagaaccuugauauccucuauuuccugcugcgcgucccgcaucuccaaauucugauccuuaaucagaacagauuuuccagcuguucuggagaccagacaccuuccgaaaaccccagccuggagcagcuguuccugggcgaaaauaugcugcaacuugccugggagaccgagcucugcugggauguguuugaagggcugucccaccuucagguucucuaccugaaccauaauuaucuuaacucucugccucccggaguguucagccaccucaccgcccugcggggccugucccuuaauucuaacagacugacaguccucagccauaaugaccugcccgcuaaccucgagauccuggacauuucccgcaaucagcuucuggcgccuaacccggauguguuuguuagccucucugugcuggacaucacgcacaauaaauucauuugugaaugcgagcuguccaccuuuaucaacuggcuuaaucacacaaacgucaccauugccgggcccccugcugauaucuacuguguguaccccgacagccugucuggcgucucccucuucagccugucuacagaaggaugcgaugaggaggaagugcucaagagccugaaguuuucccuuuucauuguuuguaccgugacgcugacacucuuccugaugaccauccugaccgucacaaaauuucggggcuucugcuuuaucugcuauaagaccgcccagagacuuguguucaaagaccauccucaagggacagagcccgauauguacaaguaugacgccuaccuguguuuuagcucuaaagauuucacguggguucagaaugcucuccugaagcaccucgacacccaguauuccgaucagaaccgcuuuaaccugugcuucgaggaacgggacuuugugccgggagaaaauagaauugccaacauccaagaugcgauuuggaauagccgcaagaucgucugucuugugucccggcauuuccugagagacggcuggugccuggaggcuuuuucuuacgcccaggggcgcugucucagcgaccugaacuccgcccuuauuauggugguugucggcucucugagccaguaucagcucaugaaacaccaauccauccggggauucgugcagaagcagcaauaccugagauggccugaggaucuccaggacgugggcugguuccugcacaaacuuucucagcagauccugaagaaagaaaaggagaagaaaaaggauaauaacauuccccugcaaacagucgcuaccaucagcuga

SEQ ID NO: 9641 - protein, 858 aa, Artificial Sequence [sequence omitted]

SEQ ID NO: 9642 - RNA, 2577 nt, Artificial Sequence
  TLR5__Homo_sapiens__AAZ17470
augggagaccaccuggaccuucuccuaggaguggugcucauggccgguccuguguuuggaauuccuuccugcuccuuugauggccgaauagccuuuuaucguuucugcaaccucacccaggucccccagguccucaacaccacugagaggcuccugcugagcuucaacuauaucaggacagucacugcuucauccuuccccuuucuggaacagcugcagcugcuggagcucgggagccaguauacccccuugacuauugacaaggaggccuucagaaaccugcccaaccuuagaaucuuggaccugggaaguaguaagauauacuucuugcauccagaugcuuuucagggacuguuccaucuguuugaacuuagacuguauuucuguggucucucugaugcuguauugaaagaugguuauuucagaacuuuaaaggcuuuaacucgcuuggaucuauccaaaaaucagauucguagccuuuaccuucauccuucauuugggaaguugaauuccuuaaaguccauagauuuuuccuccaaccaaauauuccuuguaugugaacaugagcucgagccccuacaagggaaaacgcucuccuuuuuuagccucgcagcuaauagcuuguauagcagagucucaguggacuggggaaaauguaugaacccauucagaaacauggugcuggagauacuagauguuucuggaaauggcuggacaguggacaucacaggaaacuuuagcaaugccaucagcaaaagccaggccuucucuuugauucuugcccaccacaucaugggugccggguuuggcuuccauaacaucaaagauccugaccagaacacauuugcuggccuggccagaaguucagugagacaccuggaucuuucacauggguuugucuucucccugaacucacgagucuuugagacacucaaggauuugaagguucugaaccuugccuacaacaagauaaauaagauugcagaugaagcauuuuacggacuugacaaccuccaaguucucaauuugucauauaaccuucugggggaacuuuacaguucgaauuucuauggacuaccuaagguagccuacauugauuugcaaaagaaucacauugcaauaauucaagaccaaacauucaaauuccuggaaaaauuacagaccuuggaucuccgagacaaugcucuuacaaccauucauuuuauuccaagcauacccgauaucuucuugaguggcaauaaacuagugacuuugccaaagaucaaccuuacagcgaaccucauccacuuaucagaaaacaggcuagaaaaucuagauauucucuacuuucuccuacggguaccucaucuccagauucucauuuuaaaucaaaaucgcuucuccuccuguaguggagaucaaaccccuucagagaaucccagcuuagaacagcuuuuccuuggagaaaauauguugcaacuugccugggaaacugagcucuguugggauguuuuugagggacuuucucaucuucaaguucuguauuugaaucauaacuaucuuaauucccuuccaccaggaguauuuagccaucugacugcauuaaggggacuaagccucaacuccaacaggcugacaguucuuucucacaaugauuuaccugcuaauuuagagauccuggacauauccaggaaccagcuccuagcuccuaauccugauguauuuguaucacuuagugucuuggauauaacucauaacaaguucauuugugaaugugaacuuagcacuuuuaucaauuggcuuaaucacaccaaugucacuauagcugggccuccugcagacauauauuguguguacccugacucguucucugggguuucccucuucucucuuuccacggaagguugugaugaagaggaagucuuaaagucccuaaaguucucccuuuucuuuguaugcacugucacucugacucuguuccucaugaccauccucacagucacaaaguuccggggcuucuguuuuaucuguuauaagacagcccagagacugguguucaaggaccauccccagggcacagaaccugauauguacaaauaugaugccuauuugugcuucagcagcaaagacuucacaugggugcagaaugcuuugcucaaacaccuggacacucaauacagugaccaaaacagauucaaccugugcuuugaagaaagagacuuugucccaggagaaaaccgcauugccaauauccaggaugccaucuggaacaguagaaagaucguuugucuugugagcagacacuuccuuagagauggcuggugccuugaagccuucaguuaugcccagggcaggugcuuaucugaccuuaacagugcucucaucaugguggugguuggguccuugucccaguaccaguugaugaaacaucaauccaucagaggcuuuguacagaaacagcaguauuugagguggccugaggaucuccaggauguuggcugguuucuucauaaacucucucaacagauacuaaagaaagaaaaagaaaagaagaaagacaauaacauuccguugcaaacuguagcaaccaucuccuaa

SEQ ID NO: 9643 - RNA, 2577 nt, Artificial Sequence
  derived and/or modified sequence opt1 from TLR5__Homo_sapiens__AAZ17470
augggcgaccaccuggaccuccugcugggggugguccucauggccggccccguguucgggaucccgagcugcuccuucgacggccgcaucgccuucuaccgguucugcaaccugacccaggugccccagguccugaacaccacggagcgccuccugcugagcuucaacuacauccggaccgugaccgcguccagcuuccccuuccucgagcagcugcagcugcucgagcuggggucccaguacacgccccugaccaucgacaaggaggccuuccgcaaccucccgaaccugcggauccuggaccucggcagcuccaagaucuacuuccugcaccccgacgccuuccagggccuguuccaccucuucgagcugcgccuguacuucugcgggcucagcgacgccgugcugaaggacggcuacuuccggacccugaaggcccucacccgccuggaccuguccaagaaccagauccggagccucuaccugcaccccuccuucgggaagcugaacagccucaaguccaucgacuucagcuccaaccagaucuuccuggucugcgagcacgagcuggagccccuccagggcaagacccugagcuucuucucccuggcggccaacagccucuacucccgcgugagcguggacugggggaagugcaugaacccguuccggaacaugguccuggagauccuggacgugagcggcaacggcuggacgguggacaucaccgggaacuucuccaacgccaucagcaagucccaggccuucagccucauccuggcgcaccacaucaugggcgccggguucggcuuccacaacaucaaggaccccgaccagaacaccuucgccggccuggcccgcuccagcguccggcaccucgaccugucccacggguucguguucagccugaacucccgcguguucgagacccucaaggaccugaagguccugaaccuggccuacaacaagaucaacaagaucgcggacgaggccuucuacggccucgacaaccuccaggugcugaaccugagcuacaaccugcugggggagcucuacuccagcaacuucuacggccugcccaagguggccuacaucgaccugcagaagaaccacaucgccaucauccaggaccagacguucaaguuccucgagaagcugcagacccuggaccuccgggacaacgcccugaccaccauccacuucauccccuccaucccggacaucuuccugagcgggaacaagcucgucacgcugcccaagaucaaccugaccgcgaaccucauccaccuguccgagaaccgccuggagaaccucgacauccuguacuuccugcuccgggugccccaccuccagauccugauccugaaccagaaccgcuucagcuccugcagcggcgaccagacccccuccgagaacccgagccuggagcagcuguuccucggcgagaacaugcugcagcuggccugggagaccgagcucugcugggacguguucgaggggcugagccaccuccagguccuguaccugaaccacaacuaccugaacucccucccgcccggcguguucagccaccugacggcccugcgggggcucucccugaacagcaaccgccugaccgugcucucccacaacgaccugcccgccaaccuggagauccucgacaucagccggaaccagcugcuggcccccaaccccgacgucuucgugucccucagcguccuggacaucacccacaacaaguucaucugcgagugcgagcuguccaccuucaucaacuggcucaaccacacgaacgugaccaucgcgggcccgcccgccgacaucuacugcguguaccccgacagcuucuccggggucagccuguucucccugagcaccgagggcugcgacgaggaggaggugcucaagucccugaaguucagccuguucuucgugugcaccgucacgcucacccuguuccugaugaccauccucaccgugacgaaguuccgcggcuucugcuucaucugcuacaagaccgcccagcgccugguguucaaggaccacccccaggggaccgagcccgacauguacaaguacgacgccuaccugugcuucuccagcaaggacuucaccuggguccagaacgcccuccugaagcaccuggacacgcaguacagcgaccagaaccgguucaaccucugcuucgaggagcgcgacuucgugcccggcgagaaccggaucgcgaacauccaggacgccaucuggaacucccgcaagaucgugugccuggucagccggcacuuccugcgcgacggguggugccucgaggccuucuccuacgcccagggccggugccugagcgaccugaacuccgcgcucaucauggugguggucgggagccugucccaguaccagcugaugaagcaccagagcauccgcggcuucgugcagaagcagcaguaccuccgguggccggaggaccugcaggacgugggcugguuccugcacaagcucucccagcagauccugaagaaggagaaggagaagaagaaggacaacaacaucccccugcagaccgucgccaccaucagcuga

SEQ ID NO: 9644 - RNA, 2577 nt, Artificial Sequence
  derived and/or modified sequence opt2 from TLR5__Homo_sapiens__AAZ17470
augggcgaccaccucgaccuccuccucggcgucguccucauggccggccccgucuucggcauccccuccugcuccuucgacggccgcaucgccuucuaccgcuucugcaaccucacccaggucccccagguccucaacaccaccgagcgccuccuccucuccuucaacuacauccgcaccgucaccgccuccuccuuccccuuccucgagcagcuccagcuccucgagcucggcucccaguacaccccccucaccaucgacaaggaggccuuccgcaaccuccccaaccuccgcauccucgaccucggcuccuccaagaucuacuuccuccaccccgacgccuuccagggccucuuccaccucuucgagcuccgccucuacuucugcggccucuccgacgccguccucaaggacggcuacuuccgcacccucaaggcccucacccgccucgaccucuccaagaaccagauccgcucccucuaccuccaccccuccuucggcaagcucaacucccucaaguccaucgacuucuccuccaaccagaucuuccucgucugcgagcacgagcucgagccccuccagggcaagacccucuccuucuucucccucgccgccaacucccucuacucccgcgucuccgucgacuggggcaagugcaugaaccccuuccgcaacaugguccucgagauccucgacgucuccggcaacggcuggaccgucgacaucaccggcaacuucuccaacgccaucuccaagucccaggccuucucccucauccucgcccaccacaucaugggcgccggcuucggcuuccacaacaucaaggaccccgaccagaacaccuucgccggccucgcccgcuccuccguccgccaccucgaccucucccacggcuucgucuucucccucaacucccgcgucuucgagacccucaaggaccucaagguccucaaccucgccuacaacaagaucaacaagaucgccgacgaggccuucuacggccucgacaaccuccagguccucaaccucuccuacaaccuccucggcgagcucuacuccuccaacuucuacggccuccccaaggucgccuacaucgaccuccagaagaaccacaucgccaucauccaggaccagaccuucaaguuccucgagaagcuccagacccucgaccuccgcgacaacgcccucaccaccauccacuucauccccuccauccccgacaucuuccucuccggcaacaagcucgucacccuccccaagaucaaccucaccgccaaccucauccaccucuccgagaaccgccucgagaaccucgacauccucuacuuccuccuccgcgucccccaccuccagauccucauccucaaccagaaccgcuucuccuccugcuccggcgaccagacccccuccgagaaccccucccucgagcagcucuuccucggcgagaacaugcuccagcucgccugggagaccgagcucugcugggacgucuucgagggccucucccaccuccagguccucuaccucaaccacaacuaccucaacucccucccccccggcgucuucucccaccucaccgcccuccgcggccucucccucaacuccaaccgccucaccguccucucccacaacgaccuccccgccaaccucgagauccucgacaucucccgcaaccagcuccucgcccccaaccccgacgucuucgucucccucuccguccucgacaucacccacaacaaguucaucugcgagugcgagcucuccaccuucaucaacuggcucaaccacaccaacgucaccaucgccggcccccccgccgacaucuacugcgucuaccccgacuccuucuccggcgucucccucuucucccucuccaccgagggcugcgacgaggaggagguccucaagucccucaaguucucccucuucuucgucugcaccgucacccucacccucuuccucaugaccauccucaccgucaccaaguuccgcggcuucugcuucaucugcuacaagaccgcccagcgccucgucuucaaggaccacccccagggcaccgagcccgacauguacaaguacgacgccuaccucugcuucuccuccaaggacuucaccuggguccagaacgcccuccucaagcaccucgacacccaguacuccgaccagaaccgcuucaaccucugcuucgaggagcgcgacuucguccccggcgagaaccgcaucgccaacauccaggacgccaucuggaacucccgcaagaucgucugccucgucucccgccacuuccuccgcgacggcuggugccucgaggccuucuccuacgcccagggccgcugccucuccgaccucaacuccgcccucaucauggucgucgucggcucccucucccaguaccagcucaugaagcaccaguccauccgcggcuucguccagaagcagcaguaccuccgcuggcccgaggaccuccaggacgucggcugguuccuccacaagcucucccagcagauccucaagaaggagaaggagaagaagaaggacaacaacaucccccuccagaccgucgccaccaucuccuga

SEQ ID NO: 9645 - RNA, 2577 nt, Artificial Sequence
  derived and/or modified sequence opt3 from TLR5__Homo_sapiens__AAZ17470
augggcgaccaccuggaucuccuucuggggguggucuugauggccggacccguuuucgguaucccuagcugcuccuuugacggcagaauugcuuucuacagguuuuguaacuuaacccaggugccacaaguacugaauacaacugagcggcuacuccugucuuucaacuauauacgcacggugaccgcaucaaguuuuccguuccuugaacagcugcaguugcucgagcuggggagccaguacacaccccugacuaucgauaaggaagccuuucgaaaucucccuaacuuacguauucuggaccuuggauccucuaaaaucuauuucuugcauccagaugcguuucaaggccuguuccaccuauuugagcucagacuguacuucugcggucuuucggacgcuguccugaaggauggguauuuuaggaccuugaaagcccucacacggcuggacuuaucaaagaaucagauucgcagccuguaccuccaucccaguuucggaaaacuuaacucccugaagucuaucgauuucagcuccaaucagauauuuuuggugugugaacacgagcuagagccucugcagggcaagacccucucauucuuuagucuggcagccaacagccuuuauucuagaguuuccguggacuggggcaaaugcaugaauccauucaggaacaugguccuggaaaucuuggaugugucagggaauggauggacuguagacauuacagguaacuuuagcaaugcuaucaguaagucucaagcauucucccucauucuggcccaucacaucaugggcgcuggguuuggauuccacaacauaaaagaucccgaccagaauaccuuugccggcuuagcgcggagcucgguucgccaucuggaccuaucucacgguuucguguuuucccucaacucacgagucuucgagacgcugaaggaucuuaaaguguugaaccuggcauacaauaagauuaacaagaucgccgacgaggcuuuuuacgggcucgauaaucugcaagugcuuaaccugaguuauaauuugcucggagaacuguacagcuccaacuucuauggcuuaccuaaagucgccuacauugaccugcagaagaaucauaucgcaaucauucaggaucagacuuucaaauuucuagagaagcuccagacccuggaccuuagagauaacgcuuugacaacuauacacuucaucccaucuauuccggacaucuuucugagcggcaauaaacucguuacccugcccaagauaaacuuaacagccaaucugauucaccuuucagaaaacagguuggagaaucucgauauccuguauuuccuacugcgggugccucaucuccaaauccugauucuuaaccagaaucguuuuaguuccuguagcggggaccagaccccaucugaaaaccccucauuggagcagcuguucuuaggagaaaacaugcuccaacuggcgugggagacggagcuuugcugggauguauuugaaggucugagucaccuccagguguuguaccugaaucauaacuaucuaaauagccugccuccaggcgucuucucccaccucacugcccugcgcgggcuuucuuugaacucgaauagacugacaguguuaagccauaacgaccuccccgcaaaucuggagauccuugacauuuccaggaaccagcugcuagcuccgaauccugauguuuuugugucacucaguguccuggacauaacccacaacaaauucaucugugaaugcgaguugucuacuuuuauuaauuggcugaaccacacaaaugugaccaucgccggacccccagcugauaucuacuguguauacccugacagcuucuccggcguuucauuauuuagccucucuacggaagguugcgaugaggaggaagugcugaagucccuuaaguucagucuguucuuugucuguaccgugacauugacucucuuccugaugaccauucuaacagucacuaaauuucggggguucugcuuuauaugcuauaagaccgcccagcgacugguguucaaagaccauccccaaggcacagagccagauauguacaaguaugacgcauaccuuuguuuuagcucuaaagauuucaccuggguucagaacgcccuccugaagcacuuggacacucaguauuccgaucagaaucgcuuuaaccugugcuucgaagagagagacuuugugcccggagaaaacaggaucgcuaauauucaagaugcgaucuggaacucacggaagauuguauguuuagucagucgccauuuccucagagacggcuggugccuggaggcauucagcuacgcccaggggaggugucuuucggaccugaacuccgcuuugaucauggugguugugggaucucucagccaguaucagcugaugaaacaccaaucaauacgugguuuuguccagaagcagcaauaccuacgguggccugaggaucugcaggacgugggcugguuccuucacaaacucagucagcagauccugaagaaagaaaaggagaagaaaaaggauaauaauauuccauugcaaacgguagccacaaucuccuga

SEQ ID NO: 9646 - RNA, 2577 nt, Artificial Sequence
  derived and/or modified sequence opt4 from TLR5__Homo_sapiens__AAZ17470
augggcgaccaccuggaccugcugcugggcguggugcugauggccggccccguguucggcauccccagcugcagcuucgacggcagaaucgccuucuacagauucugcaaccugacccaggugccccaggugcugaacaccaccgagagacugcugcugagcuucaacuacaucagaaccgugaccgccagcagcuuccccuuccuggagcagcugcagcugcuggagcugggcagccaguacaccccccugaccaucgacaaggaggccuucagaaaccugcccaaccugagaauccuggaccugggcagcagcaagaucuacuuccugcaccccgacgccuuccagggccuguuccaccuguucgagcugagacuguacuucugcggccugagcgacgccgugcugaaggacggcuacuucagaacccugaaggcccugaccagacuggaccugagcaagaaccagaucagaagccuguaccugcaccccagcuucggcaagcugaacagccugaagagcaucgacuucagcagcaaccagaucuuccuggugugcgagcacgagcuggagccccugcagggcaagacccugagcuucuucagccuggccgccaacagccuguacagcagagugagcguggacuggggcaagugcaugaaccccuucagaaacauggugcuggagauccuggacgugagcggcaacggcuggaccguggacaucaccggcaacuucagcaacgccaucagcaagagccaggccuucagccugauccuggcccaccacaucaugggcgccggcuucggcuuccacaacaucaaggaccccgaccagaacaccuucgccggccuggccagaagcagcgugagacaccuggaccugagccacggcuucguguucagccugaacagcagaguguucgagacccugaaggaccugaaggugcugaaccuggccuacaacaagaucaacaagaucgccgacgaggccuucuacggccuggacaaccugcaggugcugaaccugagcuacaaccugcugggcgagcuguacagcagcaacuucuacggccugcccaagguggccuacaucgaccugcagaagaaccacaucgccaucauccaggaccagaccuucaaguuccuggagaagcugcagacccuggaccugagagacaacgcccugaccaccauccacuucauccccagcauccccgacaucuuccugagcggcaacaagcuggugacccugcccaagaucaaccugaccgccaaccugauccaccugagcgagaacagacuggagaaccuggacauccuguacuuccugcugagagugccccaccugcagauccugauccugaaccagaacagauucagcagcugcagcggcgaccagacccccagcgagaaccccagccuggagcagcuguuccugggcgagaacaugcugcagcuggccugggagaccgagcugugcugggacguguucgagggccugagccaccugcaggugcuguaccugaaccacaacuaccugaacagccugccccccggcguguucagccaccugaccgcccugagaggccugagccugaacagcaacagacugaccgugcugagccacaacgaccugcccgccaaccuggagauccuggacaucagcagaaaccagcugcuggcccccaaccccgacguguucgugagccugagcgugcuggacaucacccacaacaaguucaucugcgagugcgagcugagcaccuucaucaacuggcugaaccacaccaacgugaccaucgccggcccccccgccgacaucuacugcguguaccccgacagcuucagcggcgugagccuguucagccugagcaccgagggcugcgacgaggaggaggugcugaagagccugaaguucagccuguucuucgugugcaccgugacccugacccuguuccugaugaccauccugaccgugaccaaguucagaggcuucugcuucaucugcuacaagaccgcccagagacugguguucaaggaccacccccagggcaccgagcccgacauguacaaguacgacgccuaccugugcuucagcagcaaggacuucaccugggugcagaacgcccugcugaagcaccuggacacccaguacagcgaccagaacagauucaaccugugcuucgaggagagagacuucgugcccggcgagaacagaaucgccaacauccaggacgccaucuggaacagcagaaagaucgugugccuggugagcagacacuuccugagagacggcuggugccuggaggccuucagcuacgcccagggcagaugccugagcgaccugaacagcgcccugaucauggugguggugggcagccugagccaguaccagcugaugaagcaccagagcaucagaggcuucgugcagaagcagcaguaccugagauggcccgaggaccugcaggacgugggcugguuccugcacaagcugagccagcagauccugaagaaggagaaggagaagaagaaggacaacaacaucccccugcagaccguggccaccaucagcuga

SEQ ID NO: 9647 - RNA, 2577 nt, Artificial Sequence
  derived and/or modified sequence opt5 from TLR5__Homo_sapiens__AAZ17470
augggcgaccaccuggaucuccugcuuggggugguccugauggccggacccguuuucggcaucccuagcugcuccuuugacgggagaauugcuuucuaccgguuuuguaaccucacccaggugccgcaagugcugaauacaacggagcgccuucugcucucuuucaacuauaucagaaccgucacagccagcuccuuucccuuccuggaacagcugcagcuccuggagcuuggaucucaguacaccccucugacaauugauaaggaagcguuucggaaucuccccaaccugcgcauccuugaccugggcagcuccaaaauuuauuuccuccauccugaugcuuuucaagggcuguuccaccuguuugagcucagacuguacuucugcggacuuucugacgccgugcugaaggauggcuauuuucggacccucaaagcccugacacgccuugaccugagcaagaaucagaucagaucccucuaccugcaucccagcuucggcaaacugaacucucucaaguccaucgauuucagcucuaaucagauuuuucugguuugugaacacgagcuugagccucugcaggggaagacccucuccuucuuuagccuggcugccaacucucuuuauucccgggugagcgucgacuggggaaaaugcaugaauccguuccgcaacauggugcuggaaauccucgauguuuccggcaauggguggacgguggacauuaccggaaacuuuucuaaugcuaucagcaagucccaagccuucagccugauucuggcgcaucacaucaugggcgccggguuuggauuccacaacauuaaagaucccgaccagaauacauuugcuggccucgccagaucuuccguccggcaucuggaccuuagccacggcuucguguuuucucugaacagccgcguguucgagacccucaaggaucugaaaguccugaaccuugcuuacaauaagaucaacaagaucgccgacgaagcguuuuacgggcucgauaaucugcagguucugaaccucuccuauaaucugcuuggagagcuguacucuagcaacuucuauggccucccuaaaguggccuacauugaccugcagaagaaucauaucgcuauuauccaagaucagacauucaaauuucuggagaagcugcagacccucgaccugagagauaacgcccugacgacaauucacuucauccccuccaucccugacauuuuucucagcgggaauaaacuggugacccuucccaagaucaaccugacagcuaaucucauucaccugucugaaaaccggcuggagaaucuugauauccucuauuuccugcugcgcgucccgcaucuccaaauucugauccuuaaccagaauagauuuuccagcuguucuggagaccagaccccuuccgaaaaccccagccuggagcaacucuuccugggcgaaaacaugcugcagcuugccugggagaccgagcucugcugggauguguuugaagggcugucccaucugcagguucucuaccugaaucacaacuaucuuaauucucugccucccggaguguucagccaccucacagcccugcggggccugucccuuaacucuaauagacugacgguccucagccauaacgaccugcccgcuaaucucgagauccuggacauuucccgcaaccagcuucuggcgccuaauccggauguguuuguuagccucucugugcuggacaucacccacaacaaauucauuugugaaugcgagcuguccacauuuaucaauuggcuuaaccacaccaaugucacaauugccgggcccccugcugauaucuacuguguguaccccgacagcuucucuggcgucucccuguuuagccucucuaccgaaggaugcgaugaggaggaagugcuuaagagccucaaguucucccuguucuuuguuuguacggugacacuuacccuguuccucaugaccauucugacagucaccaaauuucggggcuucugcuuuaucugcuauaagacagcccagagacugguguucaaagaccauccucaagggacggagcccgauauguacaaguaugacgccuaccuuuguuuuagcucuaaagauuucaccuggguucagaacgcucugcucaagcaccuggacacacaguauuccgaucagaaucgcuuuaaccucugcuucgaggaacgggacuuugugccgggagaaaacagaaucgccaauauucaagaugcgaucuggaacagccgcaagauugucugucuggugucccggcauuuccuuagagacggcuggugccuggaggcuuucucuuacgcccaggggcgcugucugagcgaccucaauuccgcccugaucauggugguugucggcucucuuagccaguaucagcugaugaaacaccaauccauucggggauuugugcagaagcagcaauaccucagauggccugaggaucugcaggacgugggcugguuccuccacaaacugucucagcagauccuuaagaaagaaaaggagaagaaaaaggauaacaauaucccccugcaaaccgucgcuacaauuagcuga

SEQ ID NO: 9648 - protein, 858 aa, Artificial Sequence [sequence omitted]

SEQ ID NO: 9649 - RNA, 2577 nt, Artificial Sequence
  TLR5__Homo_sapiens__AAZ17471
augggagaccaccuggaccuucuccuaggaguggugcucauggccgguccuguguuuggaauuccuuccugcuccuuugauggccgaauagccuuuuaucguuucugcaaccucacccaggucccccagguccucaacaccacugagaggcuccugcugagcuucaacuauaucaggacagucacugcuucauccuuccccuuucuggaacagcugcagcugcuggagcucgggagccaguauacccccuugacuauugacaaggaggccuucagaaaccugcccaaccuuagaaucuuggaccugggaaguaguaagauauacuucuugcauccagaugcuuuucagggacuguuccaucuguuugaacuuagacuguauuucuguggucucucugaugcuguauugaaagaugguuauuucagaaauuuaaaggcuuuaacucgcuuggaucuauccaaaaaucagauucguagccuuuaccuucauccuucauuugggaaguugaauuccuuaaaguccauagauuuuuccuccaaccaaauauuccuuguaugugaacaugagcucgagccccuacaagggaaaacgcucuccuuuuuuagccucgcagcuaauagcuuguauagcagagucucaguggacuggggaaaauguaugaacccauucagaaacauggugcuggagauacuagauguuucuggaaauggcuggacaguggacaucacaggaaacuuuagcaaugccaucagcaaaagccaggccuucucuuugauucuugcccaccacaucaugggugccggguuuggcuuccauaacaucaaagauccugaccagaacacauuugcuggccuggccagaaguucagugagacaccuggaucuuucacauggguuugucuucucccugaacucacgagucuuugagacacucaaggauuugaagguucugaaccuugccuacaacaagauaaauaagauugcagaugaagcauuuuacggacuugacaaccuccaaguucucaauuugucauauaaccuucugggggaacuuuacgguucgaauuucuauggacuaccuaagguagccuacauugauuugcaaaagaaucacauugcaauaauucaagaccaaacauucaaauuccuggaaaaauuacagaccuuggaucuccgagacaaugcucuuacaaccauucauuuuauuccaagcauacccgauaucuucuugaguggcaauaaacuagugacuuugccaaagaucaaccuuacagcgaaccucauccacuuaucagaaaacaggcuagaaaaucuagauauucucuacuuucuccuacggguaccucaucuccagauucucauuuuaaaucaaaaucgcuucuccuccuguaguggagaucaaaccccuucagagaaucccagcuuagaacagcuuuuccuuggagaaaauauguugcaacuugccugggaaacugagcucuguugggauguuuuugagggacuuucucaucuucaaguucuguauuugaaucauaacuaucuuaauucccuuccaccaggaguauuuagccaucugacugcauuaaggggacuaagccucaacuccaacaggcugacaguucuuucucacaaugauuuaccugcuaauuuagagauccuggacauauccaggaaccagcuccuagcuccuaauccugauguauuuguaucacuuagugucuuggauauaacucauaacaaguucauuugugaaugugaacuuagcacuuuuaucaauuggcuuaaucacaccaaugucacuauagcugggccuccugcagacauauauuguguguacccugacucguucucugggguuucccucuucucucuuuccacggaagguugugaugaagaggaagucuuaaagucccuaaaguucucccuuuucuuuguaugcacugucacucugacucuguuccucaugaccauccucacagucacaaaguuccggggcuucuguuuuaucuguuauaagacagcccagagacugguguucaaggaccauccccagggcacagaaccugauauguacaaauaugaugccuauuugugcuucagcagcaaagacuucacaugggugcagaaugcuuugcucaaacaccuggacacucaauacagugaccaaaacagauucaaccugugcuuugaagaaagagacuuugucccaggagaaaaccgcauugccaauauccaggaugccaucuggaacaguagaaagaucguuugucuugugagcagacacuuccuuagagauggcuggugccuugaagccuucaguuaugcccagggcaggugcuuaucugaccuuaacagugcucucaucaugguggugguuggguccuugucccaguaccaguugaugaaacaucaauccaucagaggcuuuguacagaaacagcaguauuugagguggccugaggaucuccaggauguuggcugguuucuucauaaacucucucaacagauacuaaagaaagaaaaagaaaagaagaaagacaauaacauuccguugcaaacuguagcaaccaucuccuaa

SEQ ID NO: 9650 - RNA, 2577 nt, Artificial Sequence
  derived and/or modified sequence opt1 from TLR5__Homo_sapiens__AAZ17471
augggcgaccaccuggaccuccugcugggggugguccucauggccggccccguguucgggaucccgagcugcuccuucgacggccgcaucgccuucuaccgguucugcaaccugacccaggugccccagguccugaacaccacggagcgccuccugcugagcuucaacuacauccggaccgugaccgcguccagcuuccccuuccucgagcagcugcagcugcucgagcuggggucccaguacacgccccugaccaucgacaaggaggccuuccgcaaccucccgaaccugcggauccuggaccucggcagcuccaagaucuacuuccugcaccccgacgccuuccagggccuguuccaccucuucgagcugcgccuguacuucugcgggcucagcgacgccgugcugaaggacggcuacuuccggaaccugaaggcccucacccgccuggaccuguccaagaaccagauccggagccucuaccugcaccccuccuucgggaagcugaacagccucaaguccaucgacuucagcuccaaccagaucuuccuggucugcgagcacgagcuggagccccuccagggcaagacccugagcuucuucucccuggcggccaacagccucuacucccgcgugagcguggacugggggaagugcaugaacccguuccggaacaugguccuggagauccuggacgugagcggcaacggcuggaccguggacaucacggggaacuucuccaacgccaucagcaagucccaggccuucagccucauccuggcgcaccacaucaugggcgccggguucggcuuccacaacaucaaggaccccgaccagaacaccuucgccggccuggcccgcuccagcguccggcaccucgaccugucccacggguucguguucagccugaacucccgcguguucgagacccucaaggaccugaagguccugaaccuggccuacaacaagaucaacaagaucgcggacgaggccuucuacggccucgacaaccuccaggugcugaaccugagcuacaaccugcugggggagcucuacggcuccaacuucuacgggcugcccaagguggccuacaucgaccugcagaagaaccacaucgccaucauccaggaccagaccuucaaguuccucgagaagcugcagacgcuggaccuccgggacaacgcccugaccaccauccacuucauccccagcaucccggacaucuuccuguccggcaacaagcucgucacccugcccaagaucaaccugacggcgaaccucauccaccugagcgagaaccgccuggagaaccucgacauccuguacuuccugcuccgggugccccaccuccagauccugauccugaaccagaaccgcuucuccagcugcuccggcgaccagacccccagcgagaacccgucccuggagcagcuguuccucggggagaacaugcugcagcuggccugggagaccgagcucugcugggacguguucgagggccugagccaccuccagguccuguaccugaaccacaacuaccugaacagccucccgcccgggguguucucccaccugaccgcccugcggggccucagccugaacuccaaccgccugacggugcucagccacaacgaccugcccgccaaccuggagauccucgacaucucccggaaccagcugcuggcccccaaccccgacgucuucgugagccucuccguccuggacaucacccacaacaaguucaucugcgagugcgagcugagcaccuucaucaacuggcucaaccacaccaacgugacgaucgcggggccgcccgccgacaucuacugcguguaccccgacuccuucagcggcgucucccuguucagccuguccaccgagggcugcgacgaggaggaggugcucaagagccugaaguucucccuguucuucgugugcaccgucacccucacgcuguuccugaugaccauccucaccgugaccaaguuccgcggguucugcuucaucugcuacaagacggcccagcgccugguguucaaggaccacccccagggcaccgagcccgacauguacaaguacgacgccuaccugugcuucagcuccaaggacuucaccuggguccagaacgcccuccugaagcaccuggacacccaguacagcgaccagaaccgguucaaccucugcuucgaggagcgcgacuucgugcccggggagaaccggaucgcgaacauccaggacgccaucuggaacagccgcaagaucgugugccuggucucccggcacuuccugcgcgacggcuggugccucgaggccuucagcuacgcccaggggcggugccuguccgaccugaacagcgcgcucaucauggugguggucggcucccugagccaguaccagcugaugaagcaccaguccauccgcggcuucgugcagaagcagcaguaccuccgguggccggaggaccugcaggacguggggugguuccugcacaagcucagccagcagauccugaagaaggagaaggagaagaagaaggacaacaacaucccccugcagacggucgccaccaucuccuga

SEQ ID NO: 9651 - RNA, 2577 nt, Artificial Sequence
  derived and/or modified sequence opt2 from TLR5__Homo_sapiens__AAZ17471
augggcgaccaccucgaccuccuccucggcgucguccucauggccggccccgucuucggcauccccuccugcuccuucgacggccgcaucgccuucuaccgcuucugcaaccucacccaggucccccagguccucaacaccaccgagcgccuccuccucuccuucaacuacauccgcaccgucaccgccuccuccuuccccuuccucgagcagcuccagcuccucgagcucggcucccaguacaccccccucaccaucgacaaggaggccuuccgcaaccuccccaaccuccgcauccucgaccucggcuccuccaagaucuacuuccuccaccccgacgccuuccagggccucuuccaccucuucgagcuccgccucuacuucugcggccucuccgacgccguccucaaggacggcuacuuccgcaaccucaaggcccucacccgccucgaccucuccaagaaccagauccgcucccucuaccuccaccccuccuucggcaagcucaacucccucaaguccaucgacuucuccuccaaccagaucuuccucgucugcgagcacgagcucgagccccuccagggcaagacccucuccuucuucucccucgccgccaacucccucuacucccgcgucuccgucgacuggggcaagugcaugaaccccuuccgcaacaugguccucgagauccucgacgucuccggcaacggcuggaccgucgacaucaccggcaacuucuccaacgccaucuccaagucccaggccuucucccucauccucgcccaccacaucaugggcgccggcuucggcuuccacaacaucaaggaccccgaccagaacaccuucgccggccucgcccgcuccuccguccgccaccucgaccucucccacggcuucgucuucucccucaacucccgcgucuucgagacccucaaggaccucaagguccucaaccucgccuacaacaagaucaacaagaucgccgacgaggccuucuacggccucgacaaccuccagguccucaaccucuccuacaaccuccucggcgagcucuacggcuccaacuucuacggccuccccaaggucgccuacaucgaccuccagaagaaccacaucgccaucauccaggaccagaccuucaaguuccucgagaagcuccagacccucgaccuccgcgacaacgcccucaccaccauccacuucauccccuccauccccgacaucuuccucuccggcaacaagcucgucacccuccccaagaucaaccucaccgccaaccucauccaccucuccgagaaccgccucgagaaccucgacauccucuacuuccuccuccgcgucccccaccuccagauccucauccucaaccagaaccgcuucuccuccugcuccggcgaccagacccccuccgagaaccccucccucgagcagcucuuccucggcgagaacaugcuccagcucgccugggagaccgagcucugcugggacgucuucgagggccucucccaccuccagguccucuaccucaaccacaacuaccucaacucccucccccccggcgucuucucccaccucaccgcccuccgcggccucucccucaacuccaaccgccucaccguccucucccacaacgaccuccccgccaaccucgagauccucgacaucucccgcaaccagcuccucgcccccaaccccgacgucuucgucucccucuccguccucgacaucacccacaacaaguucaucugcgagugcgagcucuccaccuucaucaacuggcucaaccacaccaacgucaccaucgccggcccccccgccgacaucuacugcgucuaccccgacuccuucuccggcgucucccucuucucccucuccaccgagggcugcgacgaggaggagguccucaagucccucaaguucucccucuucuucgucugcaccgucacccucacccucuuccucaugaccauccucaccgucaccaaguuccgcggcuucugcuucaucugcuacaagaccgcccagcgccucgucuucaaggaccacccccagggcaccgagcccgacauguacaaguacgacgccuaccucugcuucuccuccaaggacuucaccuggguccagaacgcccuccucaagcaccucgacacccaguacuccgaccagaaccgcuucaaccucugcuucgaggagcgcgacuucguccccggcgagaaccgcaucgccaacauccaggacgccaucuggaacucccgcaagaucgucugccucgucucccgccacuuccuccgcgacggcuggugccucgaggccuucuccuacgcccagggccgcugccucuccgaccucaacuccgcccucaucauggucgucgucggcucccucucccaguaccagcucaugaagcaccaguccauccgcggcuucguccagaagcagcaguaccuccgcuggcccgaggaccuccaggacgucggcugguuccuccacaagcucucccagcagauccucaagaaggagaaggagaagaagaaggacaacaacaucccccuccagaccgucgccaccaucuccuga

SEQ ID NO: 9652 - RNA, 2577 nt, Artificial Sequence
  derived and/or modified sequence opt3 from TLR5__Homo_sapiens__AAZ17471
augggcgaccaccuggaucuccuucuggggguggucuugauggccggacccguuuucgguaucccuagcugcuccuuugacggcagaauugcuuucuacagguuuuguaacuuaacccaggugccacaaguacugaauacaacugagcggcuacuccugucuuucaacuauauacgcacggugaccgcaucaaguuuuccguuccuugaacagcugcaguugcucgagcuggggagccaguacacaccccugacuaucgauaaggaagccuuucgaaaucucccuaacuuacguauucuggaccuuggauccucuaaaaucuauuucuugcauccagaugcguuucaaggccuguuccaccuauuugagcucagacuguacuucugcggucuuucggacgcuguccugaaggauggguauuuuaggaauuugaaagcccucacccggcuggacuuaucaaagaaccagauucgcagccuguaccuccaucccaguuucggaaaacuuaauucccugaagucuaucgauuucagcuccaaccagauauuuuuggugugugaacacgagcuagagccucugcagggcaagacacucucauucuuuagucuggcagccaauagccuuuauucuagaguuuccguggacuggggcaaaugcaugaacccauucaggaauaugguccuggaaaucuuggaugugucagggaacggauggaccguagacauuacugguaauuuuagcaacgcuaucaguaagucucaagcauucucccucauucuggcccaucacaucaugggcgcuggguuuggauuccacaauauaaaagaucccgaccagaacacauuugccggcuuagcgcggagcucgguucgccaucuggaccuaucucacgguuucguguuuucccucaacucacgagucuucgagacccugaaggaucuuaaaguguugaaucuggcauacaacaagauuaauaagaucgccgacgaggcuuuuuacgggcucgauaaccugcaagugcuuaaucugaguuauaacuugcucggagaacuguacggcagcaauuucuauggcuuaccuaaagucgccuacauugaccugcagaagaaccauaucgcaaucauucaggaucagacguucaaauuucuagagaagcuccagacucuggaccuuagagauaaugcuuugaccacaauacacuucaucccauccauuccggacaucuuucugucugggaacaaacucguuacucugcccaagauaaauuuaaccgccaaccugauucaccuuagcgaaaauagguuggagaaccucgauauccuguauuuccuacugcgggugccucaucuccaaauccugauucuuaaucagaaccguuuuucaaguuguuccggagaccagacaccaagcgaaaaccccucuuuggagcagcuguucuuaggugaaaauaugcuccaacuggcgugggagaccgagcuuugcugggauguauuugaaggccugucacaccuccagguguuguaccugaaccauaauuaucuaaacagucugccuccaggggucuucagccaccucacggcccugcgcggacuuuccuugaacucuaauagacugacuguguuaucgcauaaugaccuccccgcaaaccuggagauccuugacauuagcaggaaucagcugcuagcuccgaacccugauguuuuugugucccucucaguccuggacauaacacacaauaaauucaucugugaaugcgaguugaguaccuuuauuaacuggcugaaucacacuaacgugacaaucgccggucccccagcugauaucuacuguguauacccugacucuuucagcggcguuuccuuauuuucacucagcaccgaagggugcgaugaggaggaagugcugaagucucuuaaguucucccuguucuuugucuguacggugaccuugacacucuuccugaugacuauucuaaccgucacaaaauuucggggcuucugcuuuauaugcuauaagacugcccagcgacugguguucaaagaccauccccaaggaaccgagccagauauguacaaguaugacgcauaccuuuguuuuaguagcaaagauuucacauggguucagaaugcccuccugaagcacuuggacacccaguauucugaucagaaccgcuuuaaccugugcuucgaagagagagacuuugugcccggcgaaaauaggaucgcuaacauucaagaugcgaucuggaacucccggaagauuguauguuuagucucacgccauuuccucagagacggguggugccuggaggcauucaguuacgcccagggaaggugucuuagcgaccugaacucggcuuugaucauggugguuguggguucccucucucaguaucagcugaugaaacaccaaagcauacguggcuuuguccagaagcagcaauaccuacgguggccugaggaucugcaggacguggggugguuccuucacaaacucucacagcagauccugaagaaagaaaaggagaagaaaaaggauaauaauauuccauugcaaacuguagccacgaucaguuga

SEQ ID NO: 9653 - RNA, 2577 nt, Artificial Sequence
  derived and/or modified sequence opt4 from TLR5__Homo_sapiens__AAZ17471
augggcgaccaccuggaccugcugcugggcguggugcugauggccggccccguguucggcauccccagcugcagcuucgacggcagaaucgccuucuacagauucugcaaccugacccaggugccccaggugcugaacaccaccgagagacugcugcugagcuucaacuacaucagaaccgugaccgccagcagcuuccccuuccuggagcagcugcagcugcuggagcugggcagccaguacaccccccugaccaucgacaaggaggccuucagaaaccugcccaaccugagaauccuggaccugggcagcagcaagaucuacuuccugcaccccgacgccuuccagggccuguuccaccuguucgagcugagacuguacuucugcggccugagcgacgccgugcugaaggacggcuacuucagaaaccugaaggcccugaccagacuggaccugagcaagaaccagaucagaagccuguaccugcaccccagcuucggcaagcugaacagccugaagagcaucgacuucagcagcaaccagaucuuccuggugugcgagcacgagcuggagccccugcagggcaagacccugagcuucuucagccuggccgccaacagccuguacagcagagugagcguggacuggggcaagugcaugaaccccuucagaaacauggugcuggagauccuggacgugagcggcaacggcuggaccguggacaucaccggcaacuucagcaacgccaucagcaagagccaggccuucagccugauccuggcccaccacaucaugggcgccggcuucggcuuccacaacaucaaggaccccgaccagaacaccuucgccggccuggccagaagcagcgugagacaccuggaccugagccacggcuucguguucagccugaacagcagaguguucgagacccugaaggaccugaaggugcugaaccuggccuacaacaagaucaacaagaucgccgacgaggccuucuacggccuggacaaccugcaggugcugaaccugagcuacaaccugcugggcgagcuguacggcagcaacuucuacggccugcccaagguggccuacaucgaccugcagaagaaccacaucgccaucauccaggaccagaccuucaaguuccuggagaagcugcagacccuggaccugagagacaacgcccugaccaccauccacuucauccccagcauccccgacaucuuccugagcggcaacaagcuggugacccugcccaagaucaaccugaccgccaaccugauccaccugagcgagaacagacuggagaaccuggacauccuguacuuccugcugagagugccccaccugcagauccugauccugaaccagaacagauucagcagcugcagcggcgaccagacccccagcgagaaccccagccuggagcagcuguuccugggcgagaacaugcugcagcuggccugggagaccgagcugugcugggacguguucgagggccugagccaccugcaggugcuguaccugaaccacaacuaccugaacagccugccccccggcguguucagccaccugaccgcccugagaggccugagccugaacagcaacagacugaccgugcugagccacaacgaccugcccgccaaccuggagauccuggacaucagcagaaaccagcugcuggcccccaaccccgacguguucgugagccugagcgugcuggacaucacccacaacaaguucaucugcgagugcgagcugagcaccuucaucaacuggcugaaccacaccaacgugaccaucgccggcccccccgccgacaucuacugcguguaccccgacagcuucagcggcgugagccuguucagccugagcaccgagggcugcgacgaggaggaggugcugaagagccugaaguucagccuguucuucgugugcaccgugacccugacccuguuccugaugaccauccugaccgugaccaaguucagaggcuucugcuucaucugcuacaagaccgcccagagacugguguucaaggaccacccccagggcaccgagcccgacauguacaaguacgacgccuaccugugcuucagcagcaaggacuucaccugggugcagaacgcccugcugaagcaccuggacacccaguacagcgaccagaacagauucaaccugugcuucgaggagagagacuucgugcccggcgagaacagaaucgccaacauccaggacgccaucuggaacagcagaaagaucgugugccuggugagcagacacuuccugagagacggcuggugccuggaggccuucagcuacgcccagggcagaugccugagcgaccugaacagcgcccugaucauggugguggugggcagccugagccaguaccagcugaugaagcaccagagcaucagaggcuucgugcagaagcagcaguaccugagauggcccgaggaccugcaggacgugggcugguuccugcacaagcugagccagcagauccugaagaaggagaaggagaagaagaaggacaacaacaucccccugcagaccguggccaccaucagcuga

SEQ ID NO: 9654 - RNA, 2577 nt, Artificial Sequence
  derived and/or modified sequence opt5 from TLR5__Homo_sapiens__AAZ17471
augggcgaccaccuggaucuccugcuuggggugguccugauggccggacccguuuucggcaucccuagcugcuccuuugacgggagaauugcuuucuaccgguuuuguaaccucacccaggugccgcaagugcugaauacaacggagcgccuucugcucucuuucaacuauaucagaaccgucacagccagcuccuuucccuuccuggaacagcugcagcuccuggagcuuggaucucaguacaccccucugacaauugauaaggaagcguuucggaaucuccccaaccugcgcauccuugaccugggcagcuccaaaauuuauuuccuccauccugaugcuuuucaagggcuguuccaccuguuugagcucagacuguacuucugcggacuuucugacgccgugcugaaggauggcuauuuucggaaucucaaagcccugacccgccuugaccugagcaagaaccagaucagaucccucuaccugcaucccagcuucggcaaacucaauucucucaaguccaucgauuucagcucuaaccagauuuuucugguuugugaacacgagcuugagccucugcaggggaagacacucuccuucuuuagccuggcugccaauucucuuuauucccgggugagcgucgacuggggaaaaugcaugaacccguuccgcaauauggugcuggaaauccucgauguuuccggcaacggguggaccguggacauuacgggaaauuuuucuaacgcuaucagcaagucccaagccuucagccugauucuggcgcaucacaucaugggcgccggguuuggauuccacaauauuaaagaucccgaccagaacaccuuugcuggccucgccagaucuuccguccggcaucuggaccuuagccacggcuucguguuuucucugaacagccgcguguucgagacacucaaggaucugaaaguccugaaucuugcuuacaacaagaucaauaagaucgccgacgaagcguuuuacgggcucgauaaccugcagguucugaaucucuccuauaaccugcuuggagagcuguacggcucuaauuucuaugggcucccuaaaguggccuacauugaccugcagaagaaccauaucgcuauuauccaagaucagaccuucaaauuucuggagaagcugcagacacucgaccugagagauaaugcccugaccacgauucacuucauccccagcaucccugacauuuuucucuccggaaacaaacuggugacacuucccaagaucaaucugaccgcuaaccucauucaccugagcgaaaaucggcuggagaaccuugauauccucuauuuccugcugcgcgucccgcaucuccaaauucugauccuuaaucagaacagauuuucuuccuguagcggcgaccagacaccuucugaaaaccccucccuggagcagcuguuccugggggaaaauaugcugcaacuugccugggagaccgagcucugcugggauguguuugaaggacugagccaccuucagguucucuaccugaaccauaauuaucuuaacucccugccucccggcguguucucucaccucaccgcccugcggggccugagccuuaauuccaacagacugacaguccucucucauaaugaccugcccgcuaaccucgagauccuggacauuagccgcaaucagcuucuggcgccuaacccggauguguuuguuucccucagcgugcuggacaucacgcacaauaaauucauuugugaaugcgagcugucuaccuuuaucaacuggcuuaaucacacaaacgucaccauugccgggcccccugcugauaucuacuguguguaccccgacuccuucagcggagucucucuguuuucccucagcacagaaggcugcgaugaggaggaagugcugaagucucucaaguucagccuguucuuuguuuguaccgugacgcuuacacuguuccucaugaccauucugaccgucacaaaauuucggggguucugcuuuaucugcuauaagaccgcccagagacugguguucaaagaccauccucaaggaacagagcccgauauguacaaguaugacgccuaccuuuguuuuuccagcaaagauuucacguggguucagaaugcucugcucaagcaccuggacacccaguauucugaucagaaccgcuuuaaccucugcuucgaggaacgggacuuugugccgggcgaaaauagaaucgccaacauucaagaugcgaucuggaacucccgcaagauugucugucuggugagccggcauuuccuuagagacggguggugccuggaggcuuucuccuacgcccagggccgcugucugucugaccucaauagcgcccugaucauggugguugucggaucccuuucucaguaucagcugaugaaacaccaaagcauucggggcuuugugcagaagcagcaauaccucagauggccugaggaucugcaggacguggggugguuccuccacaaacugucccagcagauccuuaagaaagaaaaggagaagaaaaaggauaauaacaucccccugcaaacagucgcuaccauuucuuga

SEQ ID NO: 9655 - protein, 858 aa, Artificial Sequence [sequence omitted]

SEQ ID NO: 9656 - RNA, 2577 nt, Artificial Sequence
  TLR5__Homo_sapiens__AAZ17472
augggagaccaccuggaccuucuccuaggaguggugcucauggccgguccuguguuuggaauuccuuccugcuccuuugauggccgaauagccuuuuaucguuucugcaaccucacccaggucccccagguccucaacaccacugagaggcuccugcugagcuucaacuauaucaggacagucacugcuucauccuuccccuuucuggaacagcugcagcugcuggagcucgggagccaguauacccccuugacuauugacaaggaggccuucagaaaccugcccaaccuuagaaucuuggaccugggaaguaguaagauauacuucuugcauccagaugcuuuucagggacuguuccaucuguuugaacuuagacuguauuucuguggucucucugaugcuguauugaaagaugguuauuucagaaauuuaaaggcuuuaacucgcuuggaucuauccaaaaaucagauucguagccuuuaccuucauccuucauuugggaaguugaauuccuuaaaguccauagauuuuuccuccaaccaaauauuccuuguaugugaacaugagcucgagccccuacaagggaaaacgcucuccuuuuuuagccucgcagcuaauagcuuguauagcagagucucaguggacuggggaaaauguaugaacccauucagaaacauggugcuggagauacuagauguuucuggaaauggcuggacaguggacaucacaggaaacuuuaccaaugccaucagcaaaagccaggccuucucuuugauucuugcccaccacaucaugggugccggguuuggcuuccauaacaucaaagauccugaccagaacacauuugcuggccuggccagaaguucagugagacaccuggaucuuucacauggguuugucuucucccugaacucacgagucuuugagacacucaaggauuugaagguucugaaccuugccuacaacaagauaaauaagauugcagaugaagcauuuuacggacuugacaaccuccaaguucucaauuugucauauaaccuucugggggaacuuuacaguucgaauuucuauggacuaccuaagguagccuacauugauuugcaaaagaaucacauugcaauaauucaagaccaaacauucaaauuccuggaaaaauuacagaccuuggaucuccgagacaaugcucuuacaaccauucauuuuauuccaagcauacccgauaucuucuugaguggcaauaaacuagugacuuugccaaagaucaaccuuacagcgaaccucauccacuuaucagaaaacaggcuagaaaaucuagauauucucuacuuucuccuacggguaccucaucuccagauucucauuuuaaaucaaaaucgcuucuccuccuguaguggagaucaaaccccuucagagaaucccagcuuagaacagcuuuuccuuggagaaaauauguugcaacuugccugggaaacugagcucuguugggauguuuuugagggacuuucucaucuucaaguucuguauuugaaucauaacuaucuuaauucccuuccaccaggaguauuuagccaucugacugcauuaaggggacuaagccucaacuccaacaggcugacaguucuuucucacaaugauuuaccugcuaauuuagagauccuggacauauccaggaaccagcuccuagcuccuaauccugauguauuuguaucacuuagugucuuggauauaacucauaacaaguucauuugugaaugugaacuuagcacuuuuaucaauuggcuuaaucacaccaaugucacuauagcugggccuccugcagacauauauuguguguacccugacucguucucugggguuucccucuucucucuuuccacggaagguugugaugaagaggaagucuuaaagucccuaaaguucucccuuuucuuuguaugcacugucacucugacucuguuccucaugaccauccucacagucacaaaguuccggggcuucuguuuuaucuguuauaagacagcccagagacugguguucaaggaccauccccagggcacagaaccugauauguacaaauaugaugccuauuugugcuucagcagcaaagacuucacaugggugcagaaugcuuugcucaaacaccuggacacucaauacagugaccaaaacagauucaaccugugcuuugaagaaagagacuuugucccaggagaaaaccgcauugccaauauccaggaugccaucuggaacaguagaaagaucguuugucuugugagcagacacuuccuuagagauggcuggugccuugaagccuucaguuaugcccagggcaggugcuuaucugaccuuaacagugcucucaucaugguggugguuggguccuugucccaguaccaguugaugaaacaucaauccaucagaggcuuuguacagaaacagcaguauuugagguggccugaggaucuccaggauguuggcugguuucuucauaaacucucucaacagauacuaaagaaagaaaaagaaaagaagaaagacaauaacauuccguugcaaacuguagcaaccaucuccuaa

SEQ ID NO: 9657 - RNA, 2577 nt, Artificial Sequence
  derived and/or modified sequence opt1 from TLR5__Homo_sapiens__AAZ17472
augggcgaccaccuggaccuccugcugggggugguccucauggccggccccguguucgggaucccgagcugcuccuucgacggccgcaucgccuucuaccgguucugcaaccugacccaggugccccagguccugaacaccacggagcgccuccugcugagcuucaacuacauccggaccgugaccgcguccagcuuccccuuccucgagcagcugcagcugcucgagcuggggucccaguacacgccccugaccaucgacaaggaggccuuccgcaaccucccgaaccugcggauccuggaccucggcagcuccaagaucuacuuccugcaccccgacgccuuccagggccuguuccaccucuucgagcugcgccuguacuucugcgggcucagcgacgccgugcugaaggacggcuacuuccggaaccugaaggcccucacccgccuggaccuguccaagaaccagauccggagccucuaccugcaccccuccuucgggaagcugaacagccucaaguccaucgacuucagcuccaaccagaucuuccuggucugcgagcacgagcuggagccccuccagggcaagacccugagcuucuucucccuggcggccaacagccucuacucccgcgugagcguggacugggggaagugcaugaacccguuccggaacaugguccuggagauccuggacgugagcggcaacggcuggaccguggacaucacggggaacuucaccaacgccaucuccaagagccaggccuucucccucauccuggcgcaccacaucaugggcgccggguucggcuuccacaacaucaaggaccccgaccagaacaccuucgccggccuggcccgcagcuccguccggcaccucgaccugagccacggguucguguucucccugaacagccgcguguucgagacccucaaggaccugaagguccugaaccuggccuacaacaagaucaacaagaucgcggacgaggccuucuacggccucgacaaccuccaggugcugaaccuguccuacaaccugcugggggagcucuacagcuccaacuucuacggccugcccaagguggccuacaucgaccugcagaagaaccacaucgccaucauccaggaccagacguucaaguuccucgagaagcugcagacccuggaccuccgggacaacgcccugaccaccauccacuucauccccagcaucccggacaucuuccuguccgggaacaagcucgucacgcugcccaagaucaaccugaccgcgaaccucauccaccugagcgagaaccgccuggagaaccucgacauccuguacuuccugcuccgggugccccaccuccagauccugauccugaaccagaaccgcuucuccagcugcuccggcgaccagacccccagcgagaacccgucccuggagcagcuguuccucggcgagaacaugcugcagcuggccugggagaccgagcucugcugggacguguucgaggggcugagccaccuccagguccuguaccugaaccacaacuaccugaacagccucccgcccggcguguucucccaccugacggcccugcgggggcucagccugaacuccaaccgccugaccgugcucagccacaacgaccugcccgccaaccuggagauccucgacaucucccggaaccagcugcuggcccccaaccccgacgucuucgugagccucuccguccuggacaucacccacaacaaguucaucugcgagugcgagcugagcaccuucaucaacuggcucaaccacacgaacgugaccaucgcgggcccgcccgccgacaucuacugcguguaccccgacuccuucagcggggucucccuguucagccuguccaccgagggcugcgacgaggaggaggugcucaagagccugaaguucucccuguucuucgugugcaccgucacgcucacccuguuccugaugaccauccucaccgugacgaaguuccgcggcuucugcuucaucugcuacaagaccgcccagcgccugguguucaaggaccacccccaggggaccgagcccgacauguacaaguacgacgccuaccugugcuucagcuccaaggacuucaccuggguccagaacgcccuccugaagcaccuggacacgcaguacagcgaccagaaccgguucaaccucugcuucgaggagcgcgacuucgugcccggcgagaaccggaucgcgaacauccaggacgccaucuggaacagccgcaagaucgugugccuggucucccggcacuuccugcgcgacggguggugccucgaggccuucagcuacgcccagggccggugccuguccgaccugaacagcgcgcucaucauggugguggucgggucccugagccaguaccagcugaugaagcaccaguccauccgcggcuucgugcagaagcagcaguaccuccgguggccggaggaccugcaggacgugggcugguuccugcacaagcucagccagcagauccugaagaaggagaaggagaagaagaaggacaacaacaucccccugcagaccgucgccaccaucuccuga

SEQ ID NO: 9658 - RNA, 2577 nt, Artificial Sequence
  derived and/or modified sequence opt2 from TLR5__Homo_sapiens__AAZ17472
augggcgaccaccucgaccuccuccucggcgucguccucauggccggccccgucuucggcauccccuccugcuccuucgacggccgcaucgccuucuaccgcuucugcaaccucacccaggucccccagguccucaacaccaccgagcgccuccuccucuccuucaacuacauccgcaccgucaccgccuccuccuuccccuuccucgagcagcuccagcuccucgagcucggcucccaguacaccccccucaccaucgacaaggaggccuuccgcaaccuccccaaccuccgcauccucgaccucggcuccuccaagaucuacuuccuccaccccgacgccuuccagggccucuuccaccucuucgagcuccgccucuacuucugcggccucuccgacgccguccucaaggacggcuacuuccgcaaccucaaggcccucacccgccucgaccucuccaagaaccagauccgcucccucuaccuccaccccuccuucggcaagcucaacucccucaaguccaucgacuucuccuccaaccagaucuuccucgucugcgagcacgagcucgagccccuccagggcaagacccucuccuucuucucccucgccgccaacucccucuacucccgcgucuccgucgacuggggcaagugcaugaaccccuuccgcaacaugguccucgagauccucgacgucuccggcaacggcuggaccgucgacaucaccggcaacuucaccaacgccaucuccaagucccaggccuucucccucauccucgcccaccacaucaugggcgccggcuucggcuuccacaacaucaaggaccccgaccagaacaccuucgccggccucgcccgcuccuccguccgccaccucgaccucucccacggcuucgucuucucccucaacucccgcgucuucgagacccucaaggaccucaagguccucaaccucgccuacaacaagaucaacaagaucgccgacgaggccuucuacggccucgacaaccuccagguccucaaccucuccuacaaccuccucggcgagcucuacuccuccaacuucuacggccuccccaaggucgccuacaucgaccuccagaagaaccacaucgccaucauccaggaccagaccuucaaguuccucgagaagcuccagacccucgaccuccgcgacaacgcccucaccaccauccacuucauccccuccauccccgacaucuuccucuccggcaacaagcucgucacccuccccaagaucaaccucaccgccaaccucauccaccucuccgagaaccgccucgagaaccucgacauccucuacuuccuccuccgcgucccccaccuccagauccucauccucaaccagaaccgcuucuccuccugcuccggcgaccagacccccuccgagaaccccucccucgagcagcucuuccucggcgagaacaugcuccagcucgccugggagaccgagcucugcugggacgucuucgagggccucucccaccuccagguccucuaccucaaccacaacuaccucaacucccucccccccggcgucuucucccaccucaccgcccuccgcggccucucccucaacuccaaccgccucaccguccucucccacaacgaccuccccgccaaccucgagauccucgacaucucccgcaaccagcuccucgcccccaaccccgacgucuucgucucccucuccguccucgacaucacccacaacaaguucaucugcgagugcgagcucuccaccuucaucaacuggcucaaccacaccaacgucaccaucgccggcccccccgccgacaucuacugcgucuaccccgacuccuucuccggcgucucccucuucucccucuccaccgagggcugcgacgaggaggagguccucaagucccucaaguucucccucuucuucgucugcaccgucacccucacccucuuccucaugaccauccucaccgucaccaaguuccgcggcuucugcuucaucugcuacaagaccgcccagcgccucgucuucaaggaccacccccagggcaccgagcccgacauguacaaguacgacgccuaccucugcuucuccuccaaggacuucaccuggguccagaacgcccuccucaagcaccucgacacccaguacuccgaccagaaccgcuucaaccucugcuucgaggagcgcgacuucguccccggcgagaaccgcaucgccaacauccaggacgccaucuggaacucccgcaagaucgucugccucgucucccgccacuuccuccgcgacggcuggugccucgaggccuucuccuacgcccagggccgcugccucuccgaccucaacuccgcccucaucauggucgucgucggcucccucucccaguaccagcucaugaagcaccaguccauccgcggcuucguccagaagcagcaguaccuccgcuggcccgaggaccuccaggacgucggcugguuccuccacaagcucucccagcagauccucaagaaggagaaggagaagaagaaggacaacaacaucccccuccagaccgucgccaccaucuccuga

SEQ ID NO: 9659 - RNA, 2577 nt, Artificial Sequence
  derived and/or modified sequence opt3 from TLR5__Homo_sapiens__AAZ17472
augggcgaccaccuggaucuccuucuggggguggucuugauggccggacccguuuucgguaucccuagcugcuccuuugacggcagaauugcuuucuacagguuuuguaacuuaacccaggugccacaaguacugaauacaacugagcggcuacuccugucuuucaacuauauacgcacggugaccgcaucaaguuuuccguuccuugaacagcugcaguugcucgagcuggggagccaguacacaccccugacuaucgauaaggaagccuuucgaaaucucccuaacuuacguauucuggaccuuggauccucuaaaaucuauuucuugcauccagaugcguuucaaggccuguuccaccuauuugagcucagacuguacuucugcggucuuucggacgcuguccugaaggauggguauuuuaggaauuugaaagcccucacccggcuggacuuaucaaagaaccagauucgcagccuguaccuccaucccaguuucggaaaacuuaauucccugaagucuaucgauuucagcuccaaccagauauuuuuggugugugaacacgagcuagagccucugcagggcaagacacucucauucuuuagucuggcagccaauagccuuuauucuagaguuuccguggacuggggcaaaugcaugaacccauucaggaauaugguccuggaaaucuuggaugugucagggaacggauggaccguagacauuacugguaauuuuacaaacgcuaucagcaagagucaagcauucucucucauucuggcccaucacaucaugggcgcuggguuuggauuccacaauauaaaagaucccgaccagaacaccuuugccggcuuagcgcgguccagcguucgccaucuggaccuaucgcacgguuucguguuuucucucaacucccgagucuucgagacgcugaaggaucuuaaaguguugaaucuggcauacaacaagauuaauaagaucgccgacgaggcuuuuuacgggcucgauaaccugcaagugcuuaaucugucauauaacuugcucggagaacuguacaguagcaauuucuauggcuuaccuaaagucgccuacauugaccugcagaagaaccauaucgcaaucauucaggaucagacuuucaaauuucuagagaagcuccagacccuggaccuuagagauaaugcuuugacaacuauacacuucaucccauccauuccggacaucuuucugucuggcaacaaacucguuacccugcccaagauaaauuuaacagccaaccugauucaccuuagcgaaaauagguuggagaaccucgauauccuguauuuccuacugcgggugccucaucuccaaauccugauucuuaaucagaaccguuuuucaaguuguuccggggaccagaccccaagcgaaaaccccucuuuggagcagcuguucuuaggagaaaauaugcuccaacuggcgugggagacggagcuuugcugggauguauuugaaggucugucacaccuccagguguuguaccugaaccauaauuaucuaaacagucugccuccaggcgucuucagccaccucacugcccugcgcgggcuuuccuugaacucuaauagacugacaguguuaucgcauaaugaccuccccgcaaaccuggagauccuugacauuagcaggaaucagcugcuagcuccgaacccugauguuuuugugucccucucaguccuggacauaacccacaauaaauucaucugugaaugcgaguugaguacuuuuauuaacuggcugaaucacacaaacgugaccaucgccggacccccagcugauaucuacuguguauacccugacucuuucagcggcguuuccuuauuuucacucagcacggaagguugcgaugaggaggaagugcugaagucucuuaaguucucccuguucuuugucuguaccgugacauugacucucuuccugaugaccauucuaacagucacuaaauuucggggguucugcuuuauaugcuauaagaccgcccagcgacugguguucaaagaccauccccaaggcacagagccagauauguacaaguaugacgcauaccuuuguuuuaguagcaaagauuucaccuggguucagaaugcccuccugaagcacuuggacacucaguauucugaucagaaccgcuuuaaccugugcuucgaagagagagacuuugugcccggagaaaauaggaucgcuaacauucaagaugcgaucuggaacucccggaagauuguauguuuagucucacgccauuuccucagagacggcuggugccuggaggcauucaguuacgcccaggggaggugucuuagcgaccugaacucggcuuugaucauggugguugugggaucccucucucaguaucagcugaugaaacaccaaagcauacgugguuuuguccagaagcagcaauaccuacgguggccugaggaucugcaggacgugggcugguuccuucacaaacucucacagcagauccugaagaaagaaaaggagaagaaaaaggauaauaauauuccauugcaaacgguagccacaaucaguuga

SEQ ID NO: 9660 - RNA, 2577 nt, Artificial Sequence
  derived and/or modified sequence opt4 from TLR5__Homo_sapiens__AAZ17472
augggcgaccaccuggaccugcugcugggcguggugcugauggccggccccguguucggcauccccagcugcagcuucgacggcagaaucgccuucuacagauucugcaaccugacccaggugccccaggugcugaacaccaccgagagacugcugcugagcuucaacuacaucagaaccgugaccgccagcagcuuccccuuccuggagcagcugcagcugcuggagcugggcagccaguacaccccccugaccaucgacaaggaggccuucagaaaccugcccaaccugagaauccuggaccugggcagcagcaagaucuacuuccugcaccccgacgccuuccagggccuguuccaccuguucgagcugagacuguacuucugcggccugagcgacgccgugcugaaggacggcuacuucagaaaccugaaggcccugaccagacuggaccugagcaagaaccagaucagaagccuguaccugcaccccagcuucggcaagcugaacagccugaagagcaucgacuucagcagcaaccagaucuuccuggugugcgagcacgagcuggagccccugcagggcaagacccugagcuucuucagccuggccgccaacagccuguacagcagagugagcguggacuggggcaagugcaugaaccccuucagaaacauggugcuggagauccuggacgugagcggcaacggcuggaccguggacaucaccggcaacuucaccaacgccaucagcaagagccaggccuucagccugauccuggcccaccacaucaugggcgccggcuucggcuuccacaacaucaaggaccccgaccagaacaccuucgccggccuggccagaagcagcgugagacaccuggaccugagccacggcuucguguucagccugaacagcagaguguucgagacccugaaggaccugaaggugcugaaccuggccuacaacaagaucaacaagaucgccgacgaggccuucuacggccuggacaaccugcaggugcugaaccugagcuacaaccugcugggcgagcuguacagcagcaacuucuacggccugcccaagguggccuacaucgaccugcagaagaaccacaucgccaucauccaggaccagaccuucaaguuccuggagaagcugcagacccuggaccugagagacaacgcccugaccaccauccacuucauccccagcauccccgacaucuuccugagcggcaacaagcuggugacccugcccaagaucaaccugaccgccaaccugauccaccugagcgagaacagacuggagaaccuggacauccuguacuuccugcugagagugccccaccugcagauccugauccugaaccagaacagauucagcagcugcagcggcgaccagacccccagcgagaaccccagccuggagcagcuguuccugggcgagaacaugcugcagcuggccugggagaccgagcugugcugggacguguucgagggccugagccaccugcaggugcuguaccugaaccacaacuaccugaacagccugccccccggcguguucagccaccugaccgcccugagaggccugagccugaacagcaacagacugaccgugcugagccacaacgaccugcccgccaaccuggagauccuggacaucagcagaaaccagcugcuggcccccaaccccgacguguucgugagccugagcgugcuggacaucacccacaacaaguucaucugcgagugcgagcugagcaccuucaucaacuggcugaaccacaccaacgugaccaucgccggcccccccgccgacaucuacugcguguaccccgacagcuucagcggcgugagccuguucagccugagcaccgagggcugcgacgaggaggaggugcugaagagccugaaguucagccuguucuucgugugcaccgugacccugacccuguuccugaugaccauccugaccgugaccaaguucagaggcuucugcuucaucugcuacaagaccgcccagagacugguguucaaggaccacccccagggcaccgagcccgacauguacaaguacgacgccuaccugugcuucagcagcaaggacuucaccugggugcagaacgcccugcugaagcaccuggacacccaguacagcgaccagaacagauucaaccugugcuucgaggagagagacuucgugcccggcgagaacagaaucgccaacauccaggacgccaucuggaacagcagaaagaucgugugccuggugagcagacacuuccugagagacggcuggugccuggaggccuucagcuacgcccagggcagaugccugagcgaccugaacagcgcccugaucauggugguggugggcagccugagccaguaccagcugaugaagcaccagagcaucagaggcuucgugcagaagcagcaguaccugagauggcccgaggaccugcaggacgugggcugguuccugcacaagcugagccagcagauccugaagaaggagaaggagaagaagaaggacaacaacaucccccugcagaccguggccaccaucagcuga

SEQ ID NO: 9661 - RNA, 2577 nt, Artificial Sequence
  derived and/or modified sequence opt5 from TLR5__Homo_sapiens__AAZ17472
augggcgaccaccuggaucuccugcuuggggugguccugauggccggacccguuuucggcaucccuagcugcuccuuugacgggagaauugcuuucuaccgguuuuguaaccucacccaggugccgcaagugcugaauacaacggagcgccuucugcucucuuucaacuauaucagaaccgucacagccagcuccuuucccuuccuggaacagcugcagcuccuggagcuuggaucucaguacaccccucugacaauugauaaggaagcguuucggaaucuccccaaccugcgcauccuugaccugggcagcuccaaaauuuauuuccuccauccugaugcuuuucaagggcuguuccaccuguuugagcucagacuguacuucugcggacuuucugacgccgugcugaaggauggcuauuuucggaaucucaaagcccugacccgccuugaccugagcaagaaccagaucagaucccucuaccugcaucccagcuucggcaaacucaauucucucaaguccaucgauuucagcucuaaccagauuuuucugguuugugaacacgagcuugagccucugcaggggaagacacucuccuucuuuagccuggcugccaauucucuuuauucccgggugagcgucgacuggggaaaaugcaugaacccguuccgcaauauggugcuggaaauccucgauguuuccggcaacggguggaccguggacauuacgggaaauuuuaccaacgcuaucucuaagagccaagccuucucccugauucuggcgcaucacaucaugggcgccggguuuggauuccacaauauuaaagaucccgaccagaacacauuugcuggccucgccagaagcucuguccggcaucuggaccuuucccacggcuucguguuuagccugaacucucgcguguucgagacccucaaggaucugaaaguccugaaucuugcuuacaacaagaucaauaagaucgccgacgaagcguuuuacgggcucgauaaccugcagguucugaaucucagcuauaaccugcuuggagagcuguacuccucuaauuucuauggccucccuaaaguggccuacauugaccugcagaagaaccauaucgcuauuauccaagaucagacauucaaauuucuggagaagcugcagacccucgaccugagagauaaugcccugacgacaauucacuucauccccagcaucccugacauuuuucucuccgggaacaaacuggugacccuucccaagaucaaucugacagcuaaccucauucaccugagcgaaaaucggcuggagaaccuugauauccucuauuuccugcugcgcgucccgcaucuccaaauucugauccuuaaucagaacagauuuucuuccuguagcggagaccagaccccuucugaaaaccccucccuggagcagcuguuccugggcgaaaauaugcugcaacuugccugggagaccgagcucugcugggauguguuugaagggcugagccaccuucagguucucuaccugaaccauaauuaucuuaacucccugccucccggaguguucucucaccucacagcccugcggggccugagccuuaauuccaacagacugacgguccucucucauaaugaccugcccgcuaaccucgagauccuggacauuagccgcaaucagcuucuggcgccuaacccggauguguuuguuucccucagcgugcuggacaucacccacaauaaauucauuugugaaugcgagcugucuacauuuaucaacuggcuuaaucacaccaacgucacaauugccgggcccccugcugauaucuacuguguguaccccgacuccuucagcggcgucucucuguuuucccucagcaccgaaggaugcgaugaggaggaagugcugaagucucucaaguucagccuguucuuuguuuguacggugacacuuacccuguuccucaugaccauucugacagucaccaaauuucggggcuucugcuuuaucugcuauaagacagcccagagacugguguucaaagaccauccucaagggacggagcccgauauguacaaguaugacgccuaccuuuguuuuuccagcaaagauuucaccuggguucagaaugcucugcucaagcaccuggacacacaguauucugaucagaaccgcuuuaaccucugcuucgaggaacgggacuuugugccgggagaaaauagaaucgccaacauucaagaugcgaucuggaacucccgcaagauugucugucuggugagccggcauuuccuuagagacggcuggugccuggaggcuuucuccuacgcccaggggcgcugucugucugaccucaauagcgcccugaucauggugguugucggcucccuuucucaguaucagcugaugaaacaccaaagcauucggggauuugugcagaagcagcaauaccucagauggccugaggaucugcaggacgugggcugguuccuccacaaacugucccagcagauccuuaagaaagaaaaggagaagaaaaaggauaauaacaucccccugcaaaccgucgcuacaauuucuuga

SEQ ID NO: 9662 - protein, 858 aa, Artificial Sequence [sequence omitted]

SEQ ID NO: 9663 - RNA, 2577 nt, Artificial Sequence
  TLR5__Homo_sapiens__AAZ17473
augggagaccaccuggaccuucuccuaggaguggugcucauggccgguccuguguuuggaauuccuuccugcuccuuugauggccgaauagccuuuuaucguuucugcaaccucacccaggucccccagguccucaacaccacugagaggcuccugcugagcuucaacuauaucaggacagucacugcuucauccuuccccuuucuggaacagcugcagcugcuggagcucgggagccaguauacccccuugacuauugacaaggaggccuucagaaaccugcccaaccuuagaaucuuggaccugggaaguaguaagauauacuucuugcauccagaugcuuuucagggacuguuccaucuguuugaacuuagacuguauuucuguggucucucugaugcuguauugaaagaugguuauuucagaaauuuaaaggcuuuaacucgcuuggaucuauccaaaaaucagauucguagccuuuaccuucauccuucauuugggaaguugaauuccuuaaaguccauagauuuuuccuccaaccaaauauuccuuguaugugaacaugagcucgagccccuacaagggaaaacgcucuccuuuuuuagccucgcagcuaauagcuuguauagcagagucucaguggacuggggaaaauguaugaacccauucagaaacauggugcuggagauacuagauguuucuggaaauggcuggacaguggacaucacaggaaacuuuagcaaugccaucagcaaaagccaggccuucucuuugauucuugcccaccacaucaugggugccggguuuggcuuccauaacaucaaagauccugaccagaacacauuugcuggccuggccagaaguucagugagacaccuggaucuuucacauggguuugucuucucccugaacucacgagucuuugagacacucaaggauuugaagguucugaaccuugccuacaacaagauaaauaagauugcagaugaagcauuuuacggacuugacaaccuccaaguucucaauuugucauauaaccuucugggggaacuuuacaguucgaauuucuauggacuaccuaagguagccuacauugauuugcaaaagaaucacauugcaauaauucaagaccaaacauucaaauuccuggaaaaauuacagaccuuggaucuccgagacaaugcucuuacaaccauucauuuuauuccaagcauacccgauaucuucuugaguggcaauaaacuagugacuuugccaaagaucaaccuuacagcgaaccucauccacuuaucagaaaacaggcuagaaaaucuagauauucucuacuuucuccuacggguaccucaucuccagauucucauuuuaaaucaaaaucgcuucuccuccuguaguggagaucaaaccccuucagagaaucccagcuuagaacagcuuuuccuuggagaaaauauguugcaacuugccugggaaacugagcucuguugggauguuuuugagggacuuucucaucuucaaguucuguauuugaaucauaacuaucuuaauucccuuccaccaggaguauuuagccaucugacugcauuaaggggacuaagccucaacuccaacaggcugacaguucuuucucacaaugauuuaccugcuaauuuagagauccuggacauauccaggaaccagcuccuagcuccuaauccugauguauuuguaucacuuagugucuuggauauaacucauaacaaguucauuugugaaugugaacuuagcacuuuuaucaguuggcuuaaucacaccaaugucacuauagcugggccuccugcagacauauauuguguguacccugacucguucucugggguuucccucuucucucuuuccacggaagguugugaugaagaggaagucuuaaagucccuaaaguucucccuuuucuuuguaugcacugucacucugacucuguuccucaugaccauccucacagucacaaaguuccggggcuucuguuuuaucuguuauaagacagcccagagacugguguucaaggaccauccccagggcacagaaccugauauguacaaauaugaugccuauuugugcuucagcagcaaagacuucacaugggugcagaaugcuuugcucaaacaccuggacacucaauacagugaccaaaacagauucaaccugugcuuugaagaaagagacuuugucccaggagaaaaccgcauugccaauauccaggaugccaucuggaacaguagaaagaucguuugucuugugagcagacacuuccuuagagauggcuggugccuugaagccuucaguuaugcccagggcaggugcuuaucugaccuuaacagugcucucaucaugguggugguuggguccuugucccaguaccaguugaugaaacaucaauccaucagaggcuuuguacagaaacagcaguauuugagguggccugaggaucuccaggauguuggcugguuucuucauaaacucucucaacagauacuaaagaaagaaaaagaaaagaagaaagacaauaacauuccguugcaaacuguagcaaccaucuccuaa

SEQ ID NO: 9664 - RNA, 2577 nt, Artificial Sequence
  derived and/or modified sequence opt1 from TLR5__Homo_sapiens__AAZ17473
augggcgaccaccuggaccuccugcugggggugguccucauggccggccccguguucgggaucccgagcugcuccuucgacggccgcaucgccuucuaccgguucugcaaccugacccaggugccccagguccugaacaccacggagcgccuccugcugagcuucaacuacauccggaccgugaccgcguccagcuuccccuuccucgagcagcugcagcugcucgagcuggggucccaguacacgccccugaccaucgacaaggaggccuuccgcaaccucccgaaccugcggauccuggaccucggcagcuccaagaucuacuuccugcaccccgacgccuuccagggccuguuccaccucuucgagcugcgccuguacuucugcgggcucagcgacgccgugcugaaggacggcuacuuccggaaccugaaggcccucacccgccuggaccuguccaagaaccagauccggagccucuaccugcaccccuccuucgggaagcugaacagccucaaguccaucgacuucagcuccaaccagaucuuccuggucugcgagcacgagcuggagccccuccagggcaagacccugagcuucuucucccuggcggccaacagccucuacucccgcgugagcguggacugggggaagugcaugaacccguuccggaacaugguccuggagauccuggacgugagcggcaacggcuggaccguggacaucacggggaacuucuccaacgccaucagcaagucccaggccuucagccucauccuggcgcaccacaucaugggcgccggguucggcuuccacaacaucaaggaccccgaccagaacaccuucgccggccuggcccgcuccagcguccggcaccucgaccugucccacggguucguguucagccugaacucccgcguguucgagacccucaaggaccugaagguccugaaccuggccuacaacaagaucaacaagaucgcggacgaggccuucuacggccucgacaaccuccaggugcugaaccugagcuacaaccugcugggggagcucuacuccagcaacuucuacggccugcccaagguggccuacaucgaccugcagaagaaccacaucgccaucauccaggaccagaccuucaaguuccucgagaagcugcagacgcuggaccuccgggacaacgcccugaccaccauccacuucauccccuccaucccggacaucuuccugagcgggaacaagcucgucacccugcccaagaucaaccugacggcgaaccucauccaccuguccgagaaccgccuggagaaccucgacauccuguacuuccugcuccgggugccccaccuccagauccugauccugaaccagaaccgcuucagcuccugcagcggcgaccagacccccuccgagaacccgagccuggagcagcuguuccucggcgagaacaugcugcagcuggccugggagaccgagcucugcugggacguguucgaggggcugagccaccuccagguccuguaccugaaccacaacuaccugaacucccucccgcccggcguguucagccaccugaccgcccugcgggggcucucccugaacagcaaccgccugacggugcucucccacaacgaccugcccgccaaccuggagauccucgacaucagccggaaccagcugcuggcccccaaccccgacgucuucgugucccucagcguccuggacaucacccacaacaaguucaucugcgagugcgagcuguccaccuucaucagcuggcucaaccacaccaacgugacgaucgcgggcccgcccgccgacaucuacugcguguaccccgacuccuucagcggggucucccuguucagccuguccaccgagggcugcgacgaggaggaggugcucaagagccugaaguucucccuguucuucgugugcaccgucacccucacgcuguuccugaugaccauccucaccgugaccaaguuccgcggcuucugcuucaucugcuacaagacggcccagcgccugguguucaaggaccacccccaggggaccgagcccgacauguacaaguacgacgccuaccugugcuucagcagcaaggacuucaccuggguccagaacgcccuccugaagcaccuggacacccaguacuccgaccagaaccgguucaaccucugcuucgaggagcgcgacuucgugcccggcgagaaccggaucgcgaacauccaggacgccaucuggaacagccgcaagaucgugugccuggucucccggcacuuccugcgcgacggguggugccucgaggccuucagcuacgcccagggccggugccuguccgaccugaacagcgcgcucaucauggugguggucgggucccugagccaguaccagcugaugaagcaccaguccauccgcggcuucgugcagaagcagcaguaccuccgguggccggaggaccugcaggacgugggcugguuccugcacaagcucagccagcagauccugaagaaggagaaggagaagaagaaggacaacaacaucccccugcagacggucgccaccaucuccuga

SEQ ID NO: 9665 - RNA, 2577 nt, Artificial Sequence
  derived and/or modified sequence opt2 from TLR5__Homo_sapiens__AAZ17473
augggcgaccaccucgaccuccuccucggcgucguccucauggccggccccgucuucggcauccccuccugcuccuucgacggccgcaucgccuucuaccgcuucugcaaccucacccaggucccccagguccucaacaccaccgagcgccuccuccucuccuucaacuacauccgcaccgucaccgccuccuccuuccccuuccucgagcagcuccagcuccucgagcucggcucccaguacaccccccucaccaucgacaaggaggccuuccgcaaccuccccaaccuccgcauccucgaccucggcuccuccaagaucuacuuccuccaccccgacgccuuccagggccucuuccaccucuucgagcuccgccucuacuucugcggccucuccgacgccguccucaaggacggcuacuuccgcaaccucaaggcccucacccgccucgaccucuccaagaaccagauccgcucccucuaccuccaccccuccuucggcaagcucaacucccucaaguccaucgacuucuccuccaaccagaucuuccucgucugcgagcacgagcucgagccccuccagggcaagacccucuccuucuucucccucgccgccaacucccucuacucccgcgucuccgucgacuggggcaagugcaugaaccccuuccgcaacaugguccucgagauccucgacgucuccggcaacggcuggaccgucgacaucaccggcaacuucuccaacgccaucuccaagucccaggccuucucccucauccucgcccaccacaucaugggcgccggcuucggcuuccacaacaucaaggaccccgaccagaacaccuucgccggccucgcccgcuccuccguccgccaccucgaccucucccacggcuucgucuucucccucaacucccgcgucuucgagacccucaaggaccucaagguccucaaccucgccuacaacaagaucaacaagaucgccgacgaggccuucuacggccucgacaaccuccagguccucaaccucuccuacaaccuccucggcgagcucuacuccuccaacuucuacggccuccccaaggucgccuacaucgaccuccagaagaaccacaucgccaucauccaggaccagaccuucaaguuccucgagaagcuccagacccucgaccuccgcgacaacgcccucaccaccauccacuucauccccuccauccccgacaucuuccucuccggcaacaagcucgucacccuccccaagaucaaccucaccgccaaccucauccaccucuccgagaaccgccucgagaaccucgacauccucuacuuccuccuccgcgucccccaccuccagauccucauccucaaccagaaccgcuucuccuccugcuccggcgaccagacccccuccgagaaccccucccucgagcagcucuuccucggcgagaacaugcuccagcucgccugggagaccgagcucugcugggacgucuucgagggccucucccaccuccagguccucuaccucaaccacaacuaccucaacucccucccccccggcgucuucucccaccucaccgcccuccgcggccucucccucaacuccaaccgccucaccguccucucccacaacgaccuccccgccaaccucgagauccucgacaucucccgcaaccagcuccucgcccccaaccccgacgucuucgucucccucuccguccucgacaucacccacaacaaguucaucugcgagugcgagcucuccaccuucaucuccuggcucaaccacaccaacgucaccaucgccggcccccccgccgacaucuacugcgucuaccccgacuccuucuccggcgucucccucuucucccucuccaccgagggcugcgacgaggaggagguccucaagucccucaaguucucccucuucuucgucugcaccgucacccucacccucuuccucaugaccauccucaccgucaccaaguuccgcggcuucugcuucaucugcuacaagaccgcccagcgccucgucuucaaggaccacccccagggcaccgagcccgacauguacaaguacgacgccuaccucugcuucuccuccaaggacuucaccuggguccagaacgcccuccucaagcaccucgacacccaguacuccgaccagaaccgcuucaaccucugcuucgaggagcgcgacuucguccccggcgagaaccgcaucgccaacauccaggacgccaucuggaacucccgcaagaucgucugccucgucucccgccacuuccuccgcgacggcuggugccucgaggccuucuccuacgcccagggccgcugccucuccgaccucaacuccgcccucaucauggucgucgucggcucccucucccaguaccagcucaugaagcaccaguccauccgcggcuucguccagaagcagcaguaccuccgcuggcccgaggaccuccaggacgucggcugguuccuccacaagcucucccagcagauccucaagaaggagaaggagaagaagaaggacaacaacaucccccuccagaccgucgccaccaucuccuga

SEQ ID NO: 9666 - RNA, 2577 nt, Artificial Sequence
  derived and/or modified sequence opt3 from TLR5__Homo_sapiens__AAZ17473
augggcgaccaccuggaucuccuucuggggguggucuugauggccggacccguuuucgguaucccuagcugcuccuuugacggcagaauugcuuucuacagguuuuguaacuuaacccaggugccacaaguacugaauacaacugagcggcuacuccugucuuucaacuauauacgcacggugaccgcaucaaguuuuccguuccuugaacagcugcaguugcucgagcuggggagccaguacacaccccugacuaucgauaaggaagccuuucgaaaucucccuaacuuacguauucuggaccuuggauccucuaaaaucuauuucuugcauccagaugcguuucaaggccuguuccaccuauuugagcucagacuguacuucugcggucuuucggacgcuguccugaaggauggguauuuuaggaauuugaaagcccucacccggcuggacuuaucaaagaaccagauucgcagccuguaccuccaucccaguuucggaaaacuuaauucccugaagucuaucgauuucagcuccaaccagauauuuuuggugugugaacacgagcuagagccucugcagggcaagacacucucauucuuuagucuggcagccaauagccuuuauucuagaguuuccguggacuggggcaaaugcaugaacccauucaggaauaugguccuggaaaucuuggaugugucagggaacggauggaccguagacauuacugguaauuuuagcaacgcuaucaguaagucucaagcauucucccucauucuggcccaucacaucaugggcgcuggguuuggauuccacaauauaaaagaucccgaccagaacacauuugccggcuuagcgcggagcucgguucgccaucuggaccuaucucacgguuucguguuuucccucaacucacgagucuucgagacccugaaggaucuuaaaguguugaaucuggcauacaacaagauuaauaagaucgccgacgaggcuuuuuacgggcucgauaaccugcaagugcuuaaucugaguuauaacuugcucggagaacuguacagcuccaauuucuauggcuuaccuaaagucgccuacauugaccugcagaagaaccauaucgcaaucauucaggaucagacguucaaauuucuagagaagcuccagacucuggaccuuagagauaaugcuuugaccacaauacacuucaucccaucuauuccggacaucuuucugagcggcaacaaacucguuacucugcccaagauaaauuuaaccgccaaccugauucaccuuucagaaaauagguuggagaaccucgauauccuguauuuccuacugcgggugccucaucuccaaauccugauucuuaaucagaaccguuuuaguuccuguagcggggaccagacaccaucugaaaaccccucauuggagcagcuguucuuaggagaaaauaugcuccaacuggcgugggagaccgagcuuugcugggauguauuugaaggucugagucaccuccagguguuguaccugaaccauaauuaucuaaacagccugccuccaggcgucuucucccaccucacggcccugcgcgggcuuucuuugaacucgaauagacugacuguguuaagccauaaugaccuccccgcaaaccuggagauccuugacauuuccaggaaucagcugcuagcuccgaacccugauguuuuugugucacucaguguccuggacauaacacacaauaaauucaucugugaaugcgaguugucuaccuuuauuagcuggcugaaccacacuaaugugacaaucgccggacccccagcugauaucuacuguguauacccugacuccuucucaggcguuagcuuauuuucucucuccaccgaagguugcgaugaggaggaagugcugaagagucuuaaguucagccuguucuuugucuguacggugaccuugacacucuuccugaugacuauucuaaccgucacaaaauuucggggguucugcuuuauaugcuauaagacugcccagcgacugguguucaaagaccauccccaaggcaccgagccagauauguacaaguaugacgcauaccuuuguuuuucuuccaaagauuucacauggguucagaacgcccuccugaagcacuuggacacccaguauucagaucagaaucgcuuuaaccugugcuucgaagagagagacuuugugcccggagaaaacaggaucgcuaauauucaagaugcgaucuggaacagucggaagauuguauguuuagucagccgccauuuccucagagacggcuggugccuggaggcauucucguacgcccaggggaggugucuuuccgaccugaacucugcuuugaucauggugguugugggaagccucucacaguaucagcugaugaaacaccaaaguauacgugguuuuguccagaagcagcaauaccuacgguggccugaggaucugcaggacgugggcugguuccuucacaaacucucccagcagauccugaagaaagaaaaggagaagaaaaaggauaauaauauuccauugcaaacuguagccacgaucucuuga

SEQ ID NO: 9667 - RNA, 2577 nt, Artificial Sequence
  derived and/or modified sequence opt4 from TLR5__Homo_sapiens__AAZ17473
augggcgaccaccuggaccugcugcugggcguggugcugauggccggccccguguucggcauccccagcugcagcuucgacggcagaaucgccuucuacagauucugcaaccugacccaggugccccaggugcugaacaccaccgagagacugcugcugagcuucaacuacaucagaaccgugaccgccagcagcuuccccuuccuggagcagcugcagcugcuggagcugggcagccaguacaccccccugaccaucgacaaggaggccuucagaaaccugcccaaccugagaauccuggaccugggcagcagcaagaucuacuuccugcaccccgacgccuuccagggccuguuccaccuguucgagcugagacuguacuucugcggccugagcgacgccgugcugaaggacggcuacuucagaaaccugaaggcccugaccagacuggaccugagcaagaaccagaucagaagccuguaccugcaccccagcuucggcaagcugaacagccugaagagcaucgacuucagcagcaaccagaucuuccuggugugcgagcacgagcuggagccccugcagggcaagacccugagcuucuucagccuggccgccaacagccuguacagcagagugagcguggacuggggcaagugcaugaaccccuucagaaacauggugcuggagauccuggacgugagcggcaacggcuggaccguggacaucaccggcaacuucagcaacgccaucagcaagagccaggccuucagccugauccuggcccaccacaucaugggcgccggcuucggcuuccacaacaucaaggaccccgaccagaacaccuucgccggccuggccagaagcagcgugagacaccuggaccugagccacggcuucguguucagccugaacagcagaguguucgagacccugaaggaccugaaggugcugaaccuggccuacaacaagaucaacaagaucgccgacgaggccuucuacggccuggacaaccugcaggugcugaaccugagcuacaaccugcugggcgagcuguacagcagcaacuucuacggccugcccaagguggccuacaucgaccugcagaagaaccacaucgccaucauccaggaccagaccuucaaguuccuggagaagcugcagacccuggaccugagagacaacgcccugaccaccauccacuucauccccagcauccccgacaucuuccugagcggcaacaagcuggugacccugcccaagaucaaccugaccgccaaccugauccaccugagcgagaacagacuggagaaccuggacauccuguacuuccugcugagagugccccaccugcagauccugauccugaaccagaacagauucagcagcugcagcggcgaccagacccccagcgagaaccccagccuggagcagcuguuccugggcgagaacaugcugcagcuggccugggagaccgagcugugcugggacguguucgagggccugagccaccugcaggugcuguaccugaaccacaacuaccugaacagccugccccccggcguguucagccaccugaccgcccugagaggccugagccugaacagcaacagacugaccgugcugagccacaacgaccugcccgccaaccuggagauccuggacaucagcagaaaccagcugcuggcccccaaccccgacguguucgugagccugagcgugcuggacaucacccacaacaaguucaucugcgagugcgagcugagcaccuucaucagcuggcugaaccacaccaacgugaccaucgccggcccccccgccgacaucuacugcguguaccccgacagcuucagcggcgugagccuguucagccugagcaccgagggcugcgacgaggaggaggugcugaagagccugaaguucagccuguucuucgugugcaccgugacccugacccuguuccugaugaccauccugaccgugaccaaguucagaggcuucugcuucaucugcuacaagaccgcccagagacugguguucaaggaccacccccagggcaccgagcccgacauguacaaguacgacgccuaccugugcuucagcagcaaggacuucaccugggugcagaacgcccugcugaagcaccuggacacccaguacagcgaccagaacagauucaaccugugcuucgaggagagagacuucgugcccggcgagaacagaaucgccaacauccaggacgccaucuggaacagcagaaagaucgugugccuggugagcagacacuuccugagagacggcuggugccuggaggccuucagcuacgcccagggcagaugccugagcgaccugaacagcgcccugaucauggugguggugggcagccugagccaguaccagcugaugaagcaccagagcaucagaggcuucgugcagaagcagcaguaccugagauggcccgaggaccugcaggacgugggcugguuccugcacaagcugagccagcagauccugaagaaggagaaggagaagaagaaggacaacaacaucccccugcagaccguggccaccaucagcuga

SEQ ID NO: 9668 - RNA, 2577 nt, Artificial Sequence
  derived and/or modified sequence opt5 from TLR5__Homo_sapiens__AAZ17473
augggcgaccaccuggaucuccugcuuggggugguccugauggccggacccguuuucggcaucccuagcugcuccuuugacgggagaauugcuuucuaccgguuuuguaaccucacccaggugccgcaagugcugaauacaacggagcgccuucugcucucuuucaacuauaucagaaccgucacagccagcuccuuucccuuccuggaacagcugcagcuccuggagcuuggaucucaguacaccccucugacaauugauaaggaagcguuucggaaucuccccaaccugcgcauccuugaccugggcagcuccaaaauuuauuuccuccauccugaugcuuuucaagggcuguuccaccuguuugagcucagacuguacuucugcggacuuucugacgccgugcugaaggauggcuauuuucggaaucucaaagcccugacccgccuugaccugagcaagaaccagaucagaucccucuaccugcaucccagcuucggcaaacucaauucucucaaguccaucgauuucagcucuaaccagauuuuucugguuugugaacacgagcuugagccucugcaggggaagacacucuccuucuuuagccuggcugccaauucucuuuauucccgggugagcgucgacuggggaaaaugcaugaacccguuccgcaauauggugcuggaaauccucgauguuuccggcaacggguggaccguggacauuacgggaaauuuuucuaacgcuaucagcaagucccaagccuucagccugauucuggcgcaucacaucaugggcgccggguuuggauuccacaauauuaaagaucccgaccagaacaccuuugcuggccucgccagaucuuccguccggcaucuggaccuuagccacggcuucguguuuucucugaacagccgcguguucgagacacucaaggaucugaaaguccugaaucuugcuuacaacaagaucaauaagaucgccgacgaagcguuuuacgggcucgauaaccugcagguucugaaucucuccuauaaccugcuuggagagcuguacucuagcaauuucuauggccucccuaaaguggccuacauugaccugcagaagaaccauaucgcuauuauccaagaucagaccuucaaauuucuggagaagcugcagacacucgaccugagagauaaugcccugaccacgauucacuucauccccuccaucccugacauuuuucucagcgggaacaaacuggugacacuucccaagaucaaucugaccgcuaaccucauucaccugucugaaaaucggcuggagaaccuugauauccucuauuuccugcugcgcgucccgcaucuccaaauucugauccuuaaucagaacagauuuuccagcuguucuggagaccagacaccuuccgaaaaccccagccuggagcagcuguuccugggcgaaaauaugcugcaacuugccugggagaccgagcucugcugggauguguuugaagggcugucccaccuucagguucucuaccugaaccauaauuaucuuaacucucugccucccggaguguucagccaccucaccgcccugcggggccugucccuuaauucuaacagacugacaguccucagccauaaugaccugcccgcuaaccucgagauccuggacauuucccgcaaucagcuucuggcgccuaacccggauguguuuguuagccucucugugcuggacaucacgcacaauaaauucauuugugaaugcgagcuguccaccuuuaucagcuggcuuaaccacacaaaugucaccauugccgggcccccugcugauaucuacuguguguaccccgacucuuucuccggcgucagccuguuuucucucagcacagaaggaugcgaugaggaggaagugcugaagucccucaaguucagccuguucuuuguuuguaccgugacgcuuacacuguuccucaugaccauucugaccgucacaaaauuucggggcuucugcuuuaucugcuauaagaccgcccagagacugguguucaaagaccauccucaagggacagagcccgauauguacaaguaugacgccuaccuuuguuuuucuuccaaagauuucacguggguucagaacgcucugcucaagcaccuggacacccaguauagcgaucagaaucgcuuuaaccucugcuucgaggaacgggacuuugugccgggagaaaacagaaucgccaauauucaagaugcgaucuggaacucccgcaagauugucugucuggugucucggcauuuccuuagagacggcuggugccuggaggcuuucagcuacgcccaggggcgcugucuguccgaccucaauucugcccugaucauggugguugucggcagccuuucccaguaucagcugaugaaacaccaaucuauucggggauuugugcagaagcagcaauaccucagauggccugaggaucugcaggacgugggcugguuccuccacaaacugagccagcagauccuuaagaaagaaaaggagaagaaaaaggauaacaauaucccccugcaaacagucgcuaccauuuccuga

SEQ ID NO: 9669 - protein, 796 aa, Artificial Sequence [sequence omitted]

SEQ ID NO: 9670 - RNA, 2391 nt, Artificial Sequence
  TLR6__Homo_sapiens__ABW37065
augaccaaagacaaagaaccuauuguuaaaagcuuccauuuuguuugccuuaugaucauaauaguuggaaccagaauccaguucuccgacggaaaugaauuugcaguagacaagucaaaaagaggucuuauucauguuccaaaagaccuaccgcugaaaaccaaagucuuagauaugucucagaacuacaucgcugagcuucaggucucugacaugagcuuucuaucagaguugacaguuuugagacuuucccauaacagaauccagcuacuugauuuaaguguuuucaaguucaaccaggauuuagaauauuuggauuuaucucauaaucaguugcaaaagauauccugccauccuauugugaguuucaggcauuuagaucucucauucaaugauuucaaggcccugcccaucuguaaggaauuuggcaacuuaucacaacugaauuucuugggauugagugcuaugaagcugcaaaaauuagauuugcugccaauugcucacuugcaucuaaguuauauccuucuggauuuaagaaauuauuauauaaaagaaaaugagacagaaagucuacaaauucugaaugcaaaaacccuucaccuuguuuuucacccaacuaguuuauucgcuauccaagugaacauaucaguuaauacuuuagggugcuuacaacugacuaauauuaaauugaaugaugacaacugucaaguuuucauuaaauuuuuaucagaacucaccagagguccaaccuuacugaauuuuacccucaaccacauagaaacgacuuggaaaugccuggucagagucuuucaauuucuuuggcccaaaccuguggaauaucucaauauuuacaauuuaacaauaauugaaagcauucgugaagaagauuuuacuuauucuaaaacgacauugaaagcauugacaauagaacauaucacgaaccaaguuuuucuguuuucacagacagcuuuguacaccguguuuucugagaugaacauuaugauguuaaccauuucagauacaccuuuuauacacaugcuguguccucaugcaccaagcacauucaaguuuuugaacuuuacgcagaacguuuucacagauaguauuuuugaaaaauguuccacguuaguuaaauuggagacacuuaucuuacaaaagaauggauuaaaagaccuuuucaaaguaggucucaugacgaaggauaugccuucuuuggaaauacuggauguuagcuggaauucuuuggaaucugguagacauaaggaaaacugcacuuggguugagaguauagugguguuaaauuugucuucaaauaugcuuacugacucuguuuucagauguuuaccucccaggaucaagguacuugaucuucacagcaauaaaauaaagagcguuccuaaacaagucuuaaaacuggaagcuuugcaagaacucaauguugcuuucaauucuuuaacugaccuuccuggauguggcagcuuuagcagccuuucuguauugaucauugaucacaauucaguuucccacccaucggcugauuucuuccagagcugccagaagaugaggucaauaaaagcaggggacaauccauuccaauguaccugugagcuaagagaauuugucaaaaauauagaccaaguaucaagugaaguguuagagggcuggccugauucuuauaagugugacuacccagaaaguuauagaggaagcccacuaaaggacuuucacaugucugaauuauccugcaacauaacucugcugaucgucaccaucggugccaccaugcugguguuggcugugacugugaccucccucugcaucuacuuggaucugcccugguaucucaggauggugugccaguggacccagacucggcgcagggccaggaacauacccuuagaagaacuccaaagaaaccuccaguuucaugcuuuuauuucauauagugaacaugauucugccugggugaaaagugaauugguaccuuaccuagaaaaagaagauauacagauuugucuucaugagagaaacuuugucccuggcaagagcauuguggaaaauaucaucaacugcauugagaagaguuacaaguccaucuuuguuuugucucccaacuuuguccagagugaguggugccauuacgaacucuauuuugcccaucacaaucucuuucaugaaggaucuaauaacuuaauccucaucuuacuggaacccauuccacagaacagcauucccaacaaguaccacaagcugaaggcucucaugacgcagcggacuuauuugcaguggcccaaggagaaaagcaaacgugggcucuuuugggcuaacauuagagccgcuuuuaauaugaaauuaacacuagucacugaaaacaaugaugugaaaucuuaa

SEQ ID NO: 9671 - RNA, 2391 nt, Artificial Sequence
  derived and/or modified sequence opt1 from TLR6__Homo_sapiens__ABW37065
augaccaaggacaaggagcccaucgucaagagcuuccacuucgugugccugaugaucaucaucgugggcacccgcauccaguucuccgacgggaacgaguucgccguggacaagagcaagcggggccucauccacgucccgaaggaccugccccugaagacgaaggugcucgacaugucccagaacuacaucgccgagcuccaggugagcgacauguccuuccugagcgagcugaccguccugcgccugucccacaaccggauccagcuccuggaccugagcguguucaaguucaaccaggaccucgaguaccuggaccugucccacaaccagcuccagaagaucagcugccaccccaucguguccuuccgccaccuggaccugagcuucaacgacuucaaggcgcuccccaucugcaaggaguucgggaaccugucccagcugaacuuccucggccugagcgccaugaagcugcagaagcucgaccugcugccgaucgcccaccuccaccuguccuacauccugcucgaccugcggaacuacuacaucaaggagaacgagaccgagagccugcagauccucaacgccaagacccugcaccuggucuuccaccccacgucccucuucgccauccaggugaacaucagcgugaacacccuggggugccugcagcucaccaacaucaagcugaacgacgacaacugccaggucuucaucaaguuccuguccgagcucacccgcggccccacgcugcugaacuucacccucaaccacaucgagaccaccuggaagugccuggugcggguguuccaguuccuguggcccaagccggucgaguaccucaacaucuacaaccugacgaucaucgagagcauccgcgaggaggacuucaccuacagcaagaccacccugaaggcgcugacgaucgagcacaucaccaaccagguguuccucuucucccagaccgcccuguacaccguguucagcgagaugaacaucaugaugcugacgaucuccgacacccccuucauccacaugcucugcccccacgcccccagcaccuucaaguuccugaacuucacccagaacgucuucacggacuccaucuucgagaagugcagcacccuggugaagcucgagacccugauccugcagaagaacggccucaaggaccuguucaagguggggcugaugaccaaggacaugccgucccucgagauccuggacgucagcuggaacucccuggagagcggccggcacaaggagaacugcacguggguggaguccaucgugguccucaaccugagcuccaacaugcugaccgacagcguguuccgcugccucccgccccggaucaagguccuggaccugcacuccaacaagaucaagagcgugcccaagcagguccucaagcuggaggcccugcaggagcucaacguggcguucaacucccugaccgaccugcccgggugcggcagcuucuccagccucagcgugcugaucaucgaccacaacuccgugagccaccccuccgccgacuucuuccagagcugccagaagaugcgcuccaucaaggccggggacaaccccuuccagugcacgugcgagcugcgggaguucgucaagaacaucgaccaggugagcuccgaggugcucgagggcuggcccgacagcuacaagugcgacuacccggaguccuaccgcggcagcccccugaaggacuuccacauguccgagcugagcugcaacaucacccuccugaucgucaccaucggggccaccaugcuggugcucgccgugaccgucacgucccugugcaucuaccuggaccuccccugguaccugcggauggugugccaguggacccagacccgccggcgcgcgcggaacaucccccuggaggagcuccagcgcaaccugcaguuccacgccuucaucagcuacuccgagcacgacagcgccugggugaaguccgagcuggucccguaccucgagaaggaggacauccagaucugccugcacgagcggaacuucgugcccggcaagagcaucguggagaacaucaucaacugcaucgagaaguccuacaagagcaucuucguccugagccccaacuucgugcaguccgaguggugccacuacgagcucuacuucgcccaccacaaccuguuccacgaggggagcaacaaccugauccucauccugcuggagcccaucccgcagaacuccauccccaacaaguaccacaagcucaaggcccugaugacccagcgcaccuaccugcaguggcccaaggagaaguccaagcgcggccucuucugggcgaacauccgggccgccuucaacaugaagcugacgcuggugaccgagaacaacgacgucaagagcuga

SEQ ID NO: 9672 - RNA, 2391 nt, Artificial Sequence
  derived and/or modified sequence opt2 from TLR6__Homo_sapiens__ABW37065
augaccaaggacaaggagcccaucgucaaguccuuccacuucgucugccucaugaucaucaucgucggcacccgcauccaguucuccgacggcaacgaguucgccgucgacaaguccaagcgcggccucauccacguccccaaggaccucccccucaagaccaagguccucgacaugucccagaacuacaucgccgagcuccaggucuccgacauguccuuccucuccgagcucaccguccuccgccucucccacaaccgcauccagcuccucgaccucuccgucuucaaguucaaccaggaccucgaguaccucgaccucucccacaaccagcuccagaagaucuccugccaccccaucgucuccuuccgccaccucgaccucuccuucaacgacuucaaggcccuccccaucugcaaggaguucggcaaccucucccagcucaacuuccucggccucuccgccaugaagcuccagaagcucgaccuccuccccaucgcccaccuccaccucuccuacauccuccucgaccuccgcaacuacuacaucaaggagaacgagaccgagucccuccagauccucaacgccaagacccuccaccucgucuuccaccccaccucccucuucgccauccaggucaacaucuccgucaacacccucggcugccuccagcucaccaacaucaagcucaacgacgacaacugccaggucuucaucaaguuccucuccgagcucacccgcggccccacccuccucaacuucacccucaaccacaucgagaccaccuggaagugccucguccgcgucuuccaguuccucuggcccaagcccgucgaguaccucaacaucuacaaccucaccaucaucgaguccauccgcgaggaggacuucaccuacuccaagaccacccucaaggcccucaccaucgagcacaucaccaaccaggucuuccucuucucccagaccgcccucuacaccgucuucuccgagaugaacaucaugaugcucaccaucuccgacacccccuucauccacaugcucugcccccacgcccccuccaccuucaaguuccucaacuucacccagaacgucuucaccgacuccaucuucgagaagugcuccacccucgucaagcucgagacccucauccuccagaagaacggccucaaggaccucuucaaggucggccucaugaccaaggacaugcccucccucgagauccucgacgucuccuggaacucccucgaguccggccgccacaaggagaacugcaccugggucgaguccaucgucguccucaaccucuccuccaacaugcucaccgacuccgucuuccgcugccuccccccccgcaucaagguccucgaccuccacuccaacaagaucaaguccguccccaagcagguccucaagcucgaggcccuccaggagcucaacgucgccuucaacucccucaccgaccuccccggcugcggcuccuucuccucccucuccguccucaucaucgaccacaacuccgucucccaccccuccgccgacuucuuccaguccugccagaagaugcgcuccaucaaggccggcgacaaccccuuccagugcaccugcgagcuccgcgaguucgucaagaacaucgaccaggucuccuccgagguccucgagggcuggcccgacuccuacaagugcgacuaccccgaguccuaccgcggcuccccccucaaggacuuccacauguccgagcucuccugcaacaucacccuccucaucgucaccaucggcgccaccaugcucguccucgccgucaccgucaccucccucugcaucuaccucgaccuccccugguaccuccgcauggucugccaguggacccagacccgccgccgcgcccgcaacaucccccucgaggagcuccagcgcaaccuccaguuccacgccuucaucuccuacuccgagcacgacuccgccugggucaaguccgagcucguccccuaccucgagaaggaggacauccagaucugccuccacgagcgcaacuucguccccggcaaguccaucgucgagaacaucaucaacugcaucgagaaguccuacaaguccaucuucguccucucccccaacuucguccaguccgaguggugccacuacgagcucuacuucgcccaccacaaccucuuccacgagggcuccaacaaccucauccucauccuccucgagcccaucccccagaacuccauccccaacaaguaccacaagcucaaggcccucaugacccagcgcaccuaccuccaguggcccaaggagaaguccaagcgcggccucuucugggccaacauccgcgccgccuucaacaugaagcucacccucgucaccgagaacaacgacgucaaguccuga

SEQ ID NO: 9673 - RNA, 2391 nt, Artificial Sequence
  derived and/or modified sequence opt3 from TLR6__Homo_sapiens__ABW37065
augaccaaggacaaagagcccaucgucaagagcuuccacuuugugugccugaugauuauaaucguuggcacaaggauucaguucuccgaugggaacgaauuugccguggacaaaucuaagagaggacucauccauguaccuaaagaucuuccacugaagacuaagguguuggacaugucacaaaauuacauugcugaguuacaggucagugauaugagcuuccuguccgaacuaacggugcuccggcugucucacaaccgcauccagcuucuggacuugucgguuuuuaaauucaaucaggaucucgaguaucuggaccugucacauaaccaacuccagaagauaagcugucacccgaucgugaguuuucgacauuuagaucuguccuucaaugacuuuaaagcacuucccauuugcaaggaguucgguaacuugucucagcugaauuuucuaggccucagcgccaugaaacugcagaaacuugaucuguugccuaucgcgcaccuccaccuguccuacauuuuacuggaccuccguaacuauuacaucaaggaaaaugagaccgaaucacuucaaauacugaacgcuaaaacauugcaucuagucuuccacccaacuucccuguuugccauucaggugaauaucagcguaaacacccucgggugucugcagcuuacaaauauuaagcugaacgaugacaauugccagguuuucaucaaauucuugucugagcucaccagaggacccacucuguuaaacuuuacacugaaccauaucgaaaccacguggaagugucuagugagggucuuccaauuucucuggccuaaaccaguggaguaucugaauauuuacaaccuuacuauaaucgaguccauucgggaagaggacuucaccuauucaaagacaacuuugaaagcacugaccaucgaacacauaacaaaucagguguuucucuucagccagaccgcccuguacacggucuuuagugagaugaacauuaugaugcuuacuaucucugauacacccuucauccacaugcugugcccucaugcuccauccaccuuuaaguucuugaauuuuacucaaaacguuuucacagacagcauuuuugaaaaguguucgacccucgugaaacuggagacguuaauccugcagaagaauggccuaaaagaucucuucaagguaggucugaugaccaaagacaugccgucucuugagauuuuggauguguccuggaacucacuggaaagugggcgccacaaggagaauugcacaugggucgaaagcauagugguucucaaccuguccucuaauauguuaacugacagcguguucagaugucugcccccuaggaucaagguccuugauuugcauucaaacaaaauuaagagugugccaaaacagguacucaagcuggaggcacuacaggaacugaauguugccuuuaacucccucaccgaccugcccggaugcggcagcuucucuucacuuaguguguugaucaucgaucacaauagcgucucccauccuucugcugacuuuuuccaaucgugucagaaaaugcggagcauuaaggccggcgauaacccauuucagugcacaugcgagcugcgcgaguucgugaagaacauagaccaggucuccucagaaguguuagagggguggcccgacaguuacaaaugugauuauccggaaucuuaccgaggaagcccucucaaggacuuucacauguccgagcugucaugcaauaucacucuucugauuguuaccaucggugcgacaauguuggugcucgcaguaaccgucacuagccuguguauuuaucuagaucugcccugguaccucagaauggugugccaauggacgcagacaaggcggcgugcccgcaacaucccacuggaggaacuucagagaaauuugcaguuccacgcuuuuauaucuuauuccgagcaugacagugccuggguuaaaagcgaacuggugccuuacuuagagaaggaagauauccaaauuugucuccacgagaggaacuucguccccggcaaaucuaucguggagaauauuaucaacugcauagaaaaguccuauaagucaauuuuuguacugaguccaaauuucgugcagagcgaguggugucauuacgaacuuuacuuugcacaccacaaccuguuccaugaggggucgaauaaccuaauccucauucuguuggaacccaucccucagaauaguauaccaaacaaauaucacaagcugaaggcuuuaaugacccagcggacuuaccuccaauggccgaaggagaaaucuaagcgaggacuguucugggccaauauccgcgcggccuuuaacaugaaacuuacccugguuacagagaauaacgacgucaagagcuga

SEQ ID NO: 9674 - RNA, 2391 nt, Artificial Sequence
  derived and/or modified sequence opt4 from TLR6__Homo_sapiens__ABW37065
augaccaaggacaaggagcccaucgugaagagcuuccacuucgugugccugaugaucaucaucgugggcaccagaauccaguucagcgacggcaacgaguucgccguggacaagagcaagagaggccugauccacgugcccaaggaccugccccugaagaccaaggugcuggacaugagccagaacuacaucgccgagcugcaggugagcgacaugagcuuccugagcgagcugaccgugcugagacugagccacaacagaauccagcugcuggaccugagcguguucaaguucaaccaggaccuggaguaccuggaccugagccacaaccagcugcagaagaucagcugccaccccaucgugagcuucagacaccuggaccugagcuucaacgacuucaaggcccugcccaucugcaaggaguucggcaaccugagccagcugaacuuccugggccugagcgccaugaagcugcagaagcuggaccugcugcccaucgcccaccugcaccugagcuacauccugcuggaccugagaaacuacuacaucaaggagaacgagaccgagagccugcagauccugaacgccaagacccugcaccugguguuccaccccaccagccuguucgccauccaggugaacaucagcgugaacacccugggcugccugcagcugaccaacaucaagcugaacgacgacaacugccagguguucaucaaguuccugagcgagcugaccagaggccccacccugcugaacuucacccugaaccacaucgagaccaccuggaagugccuggugagaguguuccaguuccuguggcccaagcccguggaguaccugaacaucuacaaccugaccaucaucgagagcaucagagaggaggacuucaccuacagcaagaccacccugaaggcccugaccaucgagcacaucaccaaccagguguuccuguucagccagaccgcccuguacaccguguucagcgagaugaacaucaugaugcugaccaucagcgacacccccuucauccacaugcugugcccccacgcccccagcaccuucaaguuccugaacuucacccagaacguguucaccgacagcaucuucgagaagugcagcacccuggugaagcuggagacccugauccugcagaagaacggccugaaggaccuguucaaggugggccugaugaccaaggacaugcccagccuggagauccuggacgugagcuggaacagccuggagagcggcagacacaaggagaacugcaccuggguggagagcaucguggugcugaaccugagcagcaacaugcugaccgacagcguguucagaugccugccccccagaaucaaggugcuggaccugcacagcaacaagaucaagagcgugcccaagcaggugcugaagcuggaggcccugcaggagcugaacguggccuucaacagccugaccgaccugcccggcugcggcagcuucagcagccugagcgugcugaucaucgaccacaacagcgugagccaccccagcgccgacuucuuccagagcugccagaagaugagaagcaucaaggccggcgacaaccccuuccagugcaccugcgagcugagagaguucgugaagaacaucgaccaggugagcagcgaggugcuggagggcuggcccgacagcuacaagugcgacuaccccgagagcuacagaggcagcccccugaaggacuuccacaugagcgagcugagcugcaacaucacccugcugaucgugaccaucggcgccaccaugcuggugcuggccgugaccgugaccagccugugcaucuaccuggaccugcccugguaccugagaauggugugccaguggacccagaccagaagaagagccagaaacaucccccuggaggagcugcagagaaaccugcaguuccacgccuucaucagcuacagcgagcacgacagcgccugggugaagagcgagcuggugcccuaccuggagaaggaggacauccagaucugccugcacgagagaaacuucgugcccggcaagagcaucguggagaacaucaucaacugcaucgagaagagcuacaagagcaucuucgugcugagccccaacuucgugcagagcgaguggugccacuacgagcuguacuucgcccaccacaaccuguuccacgagggcagcaacaaccugauccugauccugcuggagcccaucccccagaacagcauccccaacaaguaccacaagcugaaggcccugaugacccagagaaccuaccugcaguggcccaaggagaagagcaagagaggccuguucugggccaacaucagagccgccuucaacaugaagcugacccuggugaccgagaacaacgacgugaagagcuga

SEQ ID NO: 9675 - RNA, 2391 nt, Artificial Sequence
  derived and/or modified sequence opt5 from TLR6__Homo_sapiens__ABW37065
augaccaaggacaaagagcccaucgugaaguccuuccacuuugugugccugaugauuaucauuguuggcacaagaauccaguucuccgaugggaacgaauuugccguggacaaaucuaagcggggacucauucaugugccuaaagaucugccgcuuaagacgaagguccuggacaugagccaaaauuacaucgcugagcuccagguguccgauaugucuuuccugagcgaacuuaccguucugcgccucucccacaacagaauccagcugcuggaccucucuguguuuaaauucaaucaggaucuggaguaucuugaccugagccauaaccaacuccagaagauuuccugucaccccaucgucagcuuucggcaucuggaucuuucuuucaaugacuuuaaagcccugccuauuugcaaggaguucggcaaccucucccagcugaauuuucuggggcucagcgcgaugaaacugcagaagcucgaucugcuccccaucgcucaucugcaccuuucuuacauucugcucgaccugcgcaacuauuacaucaaggagaaugagacagaaucccugcaaauucucaacgccaaaacccugcaccuuguguuccacccuacaagccuguuugccauccagguuaauaucucugugaacacccucggaugucugcagcuuacaaauauuaagcugaacgaugacaauugccaggucuucaucaaauuccucuccgagcugaccagaggccccacgcugcucaacuuuacccugaaccauauugaaacaaccuggaagugucuugugcggguguuccaauuucuguggccuaaaccggucgaguaucucaauaucuacaaccugacaauuaucgagagcauccgcgaagaggacuucaccuauuccaagacgacacugaaagcucuuaccauugaacacaucacaaaucagguuuuucucuucucucagaccgcccuguacaccguguuuagcgagaugaacauuaugaugcugacaaucuccgauacgcccuucauucacaugcucugcccucaugcucccagcaccuuuaaguuccugaauuuuacacaaaacguguucaccgacucuaucuuugaaaaguguuccacacuugucaaacuggagacccucauccugcagaagaaugggcugaaagaucuuuucaaggugggacucaugacgaaagacaugccuagccuggagauucuggauguuucuuggaacagccucgaauccggcagacacaaggagaauugcacauggguggaaucuaucgucgugcugaaccuuagcuccaauaugcugaccgacagcguuuuccggugucuucccccgcgcauuaaggugcuggaucugcauucuaacaaaaucaaguccgucccuaaacaggugcuuaagcucgaggcccugcaggaacugaaugucgcguuuaacagccucaccgaccugcccggcugcgggucuuucuccagccuuuccgugcugauuaucgaucacaauucuguuagccauccuuccgccgacuuuuuccaaucuugucagaaaaugagaagcauuaaggcuggagauaaccccuuucagugcacaugcgagcuccgggaguucgugaagaacaucgaccaggucuccagcgaagugcuggagggcuggcccgacucuuacaaaugugauuauccugaauccuaccgcgggagcccgcugaaggacuuucacaugucugagcuuuccugcaauaucacccuccugauuguuacaaucggagccacgaugcuggugcucgcugucaccgugacaagccuguguauuuaucuugaucugcccugguaccucagaauggugugccaauggacccagacacggcgcagagcccggaacaucccucuggaagaacugcagagaaaucuucaguuccacgcguuuauuucuuauagcgagcaugacuccgccuggguuaaaagcgaacugguccccuaccucgagaaggaagauauccaaaucugucugcacgagcgcaacuucgugccuggcaaaucuauuguggagaauaucauuaacugcaucgaaaaguccuauaagagcauuuuuguccucucccccaauuucgugcagucugaguggugucauuacgaacuguacuuugcucaccacaaccuuuuccaugaggggagcaauaaccugauccucauccugcuggaaccgauuccucagaauagcauccccaacaaauaucacaaacuuaaggcccugaugacccagcggacguaccuccaauggccuaaggagaaaucuaagagaggacuguucugggcuaauauucgcgccgccuuuaacaugaaacucacccugguuacagagaauaacgacgucaagagcuga

SEQ ID NO: 9676 - protein, 796 aa, Artificial Sequence [sequence omitted]

SEQ ID NO: 9677 - RNA, 2391 nt, Artificial Sequence
  TLR6__Homo_sapiens__ABW37070
augaccaaagacaaagaaccuauuguuaaaagcuuccauuuuguuugccuuaugaucauaauaguuggaaccagaauccaguucuccgacggaaaugaauuugcaguagacaagucaaaaagaggucuuauucauguuccaaaagaccuaccgcugaaaaccaaagucuuagauacgucucagaacuacaucgcugagcuucaggucucugacaugagcuuucuaucagaguugacaguuuugagacuuucccauaacagaauccagcuacuugauuuaaguguuuucaaguucaaccaggauuuagaauauuuggauuuaucucauaaucaguugcaaaagauauccugccauccuauugugaguuucaggcauuuagaucucucauucaaugauuucaaggcccugcccaucuguaaggaauuuggcaacuuaucacaacugaauuucuugggauugagugcuaugaagcugcaaaaauuagauuugcugccaauugcucacuugcaucuaaguuauauccuucuggauuuaagaaauuauuauauaaaagaaaaugagacagaaagucuacaaauucugaaugcaaaaacccuucaccuuguuuuucacccaacuaguuuauucgcuauccaagugaacauaucaguuaauacuuuagggugcuuacaacugacuaauauuaaauugaaugaugacaacugucaaguuuucauuaaauuuuuaucagaacucaccagagguccaaccuuacugaauuuuacccucaaccacauagaaacgacuuggaaaugccuggucagagucuuucaauuucuuuggcccaaaccuguggaauaucucaauauuuacaauuuaacaauaauugaaagcauucgugaagaagauuuuacuuauucuaaaacgacauugaaagcauugacaauagaacauaucacgaaccaaguuuuucuguuuucacagacagcuuuguacaccguguuuucugagaugaacauuaugauguuaaccauuucagauacaccuuuuauacacaugcuguguccucaugcaccaagcacauucaaguuuuugaacuuuacccagaacguuuucacagauaguauuuuugaaaaauguuccacguuaguuaaauuggagacacuuaucuuacaaaagaauggauuaaaagaccuuuucaaaguaggucucaugacgaaggauaugccuucuuuggaaauacuggauguuagcuggaauucuuuggaaucugguagacauaaagaaaacugcacuuggguugagaguauagugguguuaaauuugucuucaaauaugcuuacugacucuguuuucagauguuuaccucccaggaucaagguacuugaucuucacagcaauaaaauaaagagcguuccuaaacaagucguaaaacuggaagcuuugcaagaacucaauguugcuuucaauucuuuaacugaccuuccuggauguggcagcuuuagcagccuuucuguauugaucauugaucacaauucaguuucccacccaucggcugauuucuuccagagcugccagaagaugaggucaauaaaagcaggggacaauccauuccaauguaccugugagcuaagagaauuugucaaaaauauagaccaaguaucaagugaaguguuagagggcuggccugauucuuauaagugugacuacccagaaaguuauagaggaagcccacuaaaggacuuucacaugucugaauuauccugcaacauaacucugcugaucgucaccaucggugccaccaugcugguguuggcugugacugugaccucccucugcaucuacuuggaucugcccugguaucucaggauggugugccaguggacccagacucggcgcagggccaggaacauacccuuagaagaacuccaaagaaaccuccaguuucaugcuuuuauuucauauagugaacaugauucugccugggugaaaagugaauugguaccuuaccuagaaaaagaagauauacagauuugucuucaugagagaaacuuugucccuggcaagagcauuguggaaaauaucaucaacugcauugagaagaguuacaaguccaucuuuguuuugucucccaacuuuguccagagugaguggugccauuacgaacucuauuuugcccaucacaaucucuuucaugaaggaucuaauaacuuaauccucaucuuacuggaacccauuccacagaacagcauucccaacaaguaccacaagcugaaggcucucaugacgcagcggacuuauuugcaguggcccaaggagaaaagcaaacgugggcucuuuugggcuaacauuagagccgcuuuuaauaugaaauuaacacuagucacugaaaacaaugaugugaaaucuuaa

SEQ ID NO: 9678 - RNA, 2391 nt, Artificial Sequence
  derived and/or modified sequence opt1 from TLR6__Homo_sapiens__ABW37070
augaccaaggacaaggagcccaucgucaagagcuuccacuucgugugccugaugaucaucaucgugggcacccgcauccaguucagcgacgggaacgaguucgccguggacaagagcaagcggggccucauccacgucccgaaggaccugccccugaagacgaaggugcucgacaccucccagaacuacaucgccgagcuccaggugagcgacauguccuuccugagcgagcugaccguccugcgccugucccacaaccggauccagcuccuggaccugagcguguucaaguucaaccaggaccucgaguaccuggaccugucccacaaccagcuccagaagaucagcugccaccccaucguguccuuccgccaccuggaccugagcuucaacgacuucaaggcgcuccccaucugcaaggaguucgggaaccugucccagcugaacuuccucggccugagcgccaugaagcugcagaagcucgaccugcugccgaucgcccaccuccaccuguccuacauccugcucgaccugcggaacuacuacaucaaggagaacgagaccgagagccugcagauccucaacgccaagacgcugcaccuggucuuccaccccaccucccucuucgccauccaggugaacaucagcgugaacacccuggggugccugcagcucaccaacaucaagcugaacgacgacaacugccaggucuucaucaaguuccuguccgagcucacgcgcggccccacccugcugaacuucacccucaaccacaucgagaccacguggaagugccuggugcggguguuccaguuccuguggcccaagccggucgaguaccucaacaucuacaaccugaccaucaucgagagcauccgcgaggaggacuucaccuacagcaagaccacgcugaaggcgcugaccaucgagcacaucaccaaccagguguuccucuucucccagaccgcccuguacacgguguucagcgagaugaacaucaugaugcugaccaucuccgacacccccuucauccacaugcucugcccccacgcccccagcaccuucaaguuccugaacuucacgcagaacgucuucaccgacuccaucuucgagaagugcagcacccuggugaagcucgagacccugauccugcagaagaacggccucaaggaccuguucaagguggggcugaugacgaaggacaugccgucccucgagauccuggacgucagcuggaacucccuggagagcggccggcacaaggagaacugcaccuggguggaguccaucgugguccucaaccugagcuccaacaugcugaccgacagcguguuccgcugccucccgccccggaucaagguccuggaccugcacuccaacaagaucaagagcgugcccaagcaggucgugaagcucgaggcccugcaggagcugaacguggcguucaacucccucaccgaccugcccgggugcggcagcuucuccagccugagcgugcucaucaucgaccacaacuccgucagccaccccuccgccgacuucuuccagagcugccagaagaugcgcuccaucaaggccggggacaaccccuuccagugcacgugcgagcugcgggaguucgugaagaacaucgaccaggugagcuccgagguccuggagggcuggcccgacagcuacaagugcgacuacccggaguccuaccgcggcagcccccucaaggacuuccacauguccgagcugagcugcaacaucacccugcucaucgugaccaucggggccaccaugcuggugcuggccgucacggugaccucccucugcaucuaccuggaccugcccugguaccuccggauggugugccaguggacccagacccgccggcgcgcgcggaacaucccccuggaggagcugcagcgcaaccuccaguuccacgccuucaucagcuacuccgagcacgacagcgccugggucaaguccgagcuggugccguaccuggagaaggaggacauccagaucugccuccacgagcggaacuucgugcccggcaagagcaucgucgagaacaucaucaacugcaucgagaaguccuacaagagcaucuucgugcugagccccaacuucgugcaguccgaguggugccacuacgagcuguacuucgcccaccacaaccucuuccacgaggggagcaacaaccugauccugauccuccuggagcccaucccgcagaacuccauccccaacaaguaccacaagcugaaggcccucaugacccagcgcacguaccugcaguggcccaaggagaaguccaagcgcggccuguucugggcgaacauccgggccgccuucaacaugaagcucacccuggucaccgagaacaacgacgugaaguccuga

SEQ ID NO: 9679 - RNA, 2391 nt, Artificial Sequence
  derived and/or modified sequence opt2 from TLR6__Homo_sapiens__ABW37070
augaccaaggacaaggagcccaucgucaaguccuuccacuucgucugccucaugaucaucaucgucggcacccgcauccaguucuccgacggcaacgaguucgccgucgacaaguccaagcgcggccucauccacguccccaaggaccucccccucaagaccaagguccucgacaccucccagaacuacaucgccgagcuccaggucuccgacauguccuuccucuccgagcucaccguccuccgccucucccacaaccgcauccagcuccucgaccucuccgucuucaaguucaaccaggaccucgaguaccucgaccucucccacaaccagcuccagaagaucuccugccaccccaucgucuccuuccgccaccucgaccucuccuucaacgacuucaaggcccuccccaucugcaaggaguucggcaaccucucccagcucaacuuccucggccucuccgccaugaagcuccagaagcucgaccuccuccccaucgcccaccuccaccucuccuacauccuccucgaccuccgcaacuacuacaucaaggagaacgagaccgagucccuccagauccucaacgccaagacccuccaccucgucuuccaccccaccucccucuucgccauccaggucaacaucuccgucaacacccucggcugccuccagcucaccaacaucaagcucaacgacgacaacugccaggucuucaucaaguuccucuccgagcucacccgcggccccacccuccucaacuucacccucaaccacaucgagaccaccuggaagugccucguccgcgucuuccaguuccucuggcccaagcccgucgaguaccucaacaucuacaaccucaccaucaucgaguccauccgcgaggaggacuucaccuacuccaagaccacccucaaggcccucaccaucgagcacaucaccaaccaggucuuccucuucucccagaccgcccucuacaccgucuucuccgagaugaacaucaugaugcucaccaucuccgacacccccuucauccacaugcucugcccccacgcccccuccaccuucaaguuccucaacuucacccagaacgucuucaccgacuccaucuucgagaagugcuccacccucgucaagcucgagacccucauccuccagaagaacggccucaaggaccucuucaaggucggccucaugaccaaggacaugcccucccucgagauccucgacgucuccuggaacucccucgaguccggccgccacaaggagaacugcaccugggucgaguccaucgucguccucaaccucuccuccaacaugcucaccgacuccgucuuccgcugccuccccccccgcaucaagguccucgaccuccacuccaacaagaucaaguccguccccaagcaggucgucaagcucgaggcccuccaggagcucaacgucgccuucaacucccucaccgaccuccccggcugcggcuccuucuccucccucuccguccucaucaucgaccacaacuccgucucccaccccuccgccgacuucuuccaguccugccagaagaugcgcuccaucaaggccggcgacaaccccuuccagugcaccugcgagcuccgcgaguucgucaagaacaucgaccaggucuccuccgagguccucgagggcuggcccgacuccuacaagugcgacuaccccgaguccuaccgcggcuccccccucaaggacuuccacauguccgagcucuccugcaacaucacccuccucaucgucaccaucggcgccaccaugcucguccucgccgucaccgucaccucccucugcaucuaccucgaccuccccugguaccuccgcauggucugccaguggacccagacccgccgccgcgcccgcaacaucccccucgaggagcuccagcgcaaccuccaguuccacgccuucaucuccuacuccgagcacgacuccgccugggucaaguccgagcucguccccuaccucgagaaggaggacauccagaucugccuccacgagcgcaacuucguccccggcaaguccaucgucgagaacaucaucaacugcaucgagaaguccuacaaguccaucuucguccucucccccaacuucguccaguccgaguggugccacuacgagcucuacuucgcccaccacaaccucuuccacgagggcuccaacaaccucauccucauccuccucgagcccaucccccagaacuccauccccaacaaguaccacaagcucaaggcccucaugacccagcgcaccuaccuccaguggcccaaggagaaguccaagcgcggccucuucugggccaacauccgcgccgccuucaacaugaagcucacccucgucaccgagaacaacgacgucaaguccuga

SEQ ID NO: 9680 - RNA, 2391 nt, Artificial Sequence
  derived and/or modified sequence opt3 from TLR6__Homo_sapiens__ABW37070
augaccaaggacaaagagcccaucgugaaguccuuccacuuugugugccugaugauuauaaucguuggcacaaggauucaguucuccgaugggaacgaauuugccguggacaaaucuaagagaggacucauccauguaccuaaagaucuuccacugaagacuaagguguuggacacgucacaaaauuacauugcugaguuacaggucagugauaugagcuuccuguccgaacuaaccgugcuccggcugucucacaaccgcauccagcuucuggacuugucgguuuuuaaauucaaucaggaucucgaguaucuggaccugucacauaaccaacuccagaagauaagcugucacccgaucgugaguuuucgacauuuagaucuguccuucaaugacuuuaaagcacuucccauuugcaaggaguucgguaacuugucucagcugaauuuucuaggccucagcgccaugaaacugcagaaacuugaucuguugccuaucgcgcaccuccaccuguccuacauuuuacuggaccuccguaacuauuacaucaaggagaaugagacagaaucacuucaaauacugaacgcuaagacuuugcaucuagucuuccacccaaccagucuguuugccauucaggugaauaucagcguaaacacacucgggugucugcagcuuaccaauauuaagcugaacgaugacaauugccagguuuucaucaaauucuugucugagcucacuagaggacccacacuguuaaacuuuacccugaaccauaucgaaacgacuuggaagugucuagugagggucuuccaauuucucuggccuaaaccaguggaguaucugaauauuuacaaccuuaccauaaucgaguccauucgggaagaggacuucacauauucaaagacuaccuugaaagcacugacaaucgaacacauaaccaaucagguguuucucuucagccagacggcccuguacacugucuuuagugagaugaacauuaugaugcuuacaaucucugauacccccuucauccacaugcugugcccucaugcuccauccacuuuuaaguucuugaauuuuacacaaaacguuuucaccgacagcauuuuugaaaaguguucgacgcucgugaaacuggagaccuuaauccugcagaagaauggccuaaaagaucucuucaagguaggucugaugacaaaagacaugccgucucuugagauuuuggauguguccuggaacucacuggaaagugggcgccacaaggagaauugcacuugggucgaaagcauagugguucucaaccuguccucuaauauguuaaccgacagcguguucagaugucugcccccuaggaucaagguccuugauuugcauucaaacaaaauuaagagugugccaaaacagguaguuaagcucgaggcacugcaggaacuaaauguggccuuuaacucccugacagaccuccccggaugcggcagcuucucuucacugaguguccuuaucaucgaucacaauagcgugucccauccuucugcugacuuuuuccaaucgugucagaaaaugcggagcauuaaggccggcgauaacccauuucagugcacuugcgaguugcgcgaguucgucaagaacauagaccagguguccucagaaguucuggagggguggcccgacaguuacaaaugugauuauccggaaucuuaccgaggaagcccuuuaaaggacuuucacauguccgagcucucaugcaauaucacccugcuuauugugacaaucggugcgaccaugcugguauuggcagucacugugacgagccucuguauuuaucuggaucuacccugguaccugagaaugguuugccaauggacacagaccaggcggcgugcccgcaacaucccacucgaagaacugcagagaaaucuucaguuccacgcuuuuauaucuuauuccgagcaugacagugccugggugaaaagcgaauuggucccuuaccuggagaaggaagauauccaaauuuguuuacacgagaggaacuucgugcccggcaaaucuaucguagagaauauuaucaacugcauagaaaaguccuauaagucaauuuuugugcucaguccaaauuucguucagagcgaguggugucauuacgaacuguacuuugcacaccacaaccuuuuccaugaggggucgaauaaccugauccuaauucuccuggaacccaucccucagaauagcauaccaaacaaauaucacaaguugaaagcucugaugacucagcggaccuacuuacaauggccgaaggagaaaucuaagcgaggacucuucugggccaauauccgcgcggccuuuaacaugaaacugacacuugucaccgagaauaacgacgucaagagcuga

SEQ ID NO: 9681 - RNA, 2391 nt, Artificial Sequence
  derived and/or modified sequence opt4 from TLR6__Homo_sapiens__ABW37070
augaccaaggacaaggagcccaucgugaagagcuuccacuucgugugccugaugaucaucaucgugggcaccagaauccaguucagcgacggcaacgaguucgccguggacaagagcaagagaggccugauccacgugcccaaggaccugccccugaagaccaaggugcuggacaccagccagaacuacaucgccgagcugcaggugagcgacaugagcuuccugagcgagcugaccgugcugagacugagccacaacagaauccagcugcuggaccugagcguguucaaguucaaccaggaccuggaguaccuggaccugagccacaaccagcugcagaagaucagcugccaccccaucgugagcuucagacaccuggaccugagcuucaacgacuucaaggcccugcccaucugcaaggaguucggcaaccugagccagcugaacuuccugggccugagcgccaugaagcugcagaagcuggaccugcugcccaucgcccaccugcaccugagcuacauccugcuggaccugagaaacuacuacaucaaggagaacgagaccgagagccugcagauccugaacgccaagacccugcaccugguguuccaccccaccagccuguucgccauccaggugaacaucagcgugaacacccugggcugccugcagcugaccaacaucaagcugaacgacgacaacugccagguguucaucaaguuccugagcgagcugaccagaggccccacccugcugaacuucacccugaaccacaucgagaccaccuggaagugccuggugagaguguuccaguuccuguggcccaagcccguggaguaccugaacaucuacaaccugaccaucaucgagagcaucagagaggaggacuucaccuacagcaagaccacccugaaggcccugaccaucgagcacaucaccaaccagguguuccuguucagccagaccgcccuguacaccguguucagcgagaugaacaucaugaugcugaccaucagcgacacccccuucauccacaugcugugcccccacgcccccagcaccuucaaguuccugaacuucacccagaacguguucaccgacagcaucuucgagaagugcagcacccuggugaagcuggagacccugauccugcagaagaacggccugaaggaccuguucaaggugggccugaugaccaaggacaugcccagccuggagauccuggacgugagcuggaacagccuggagagcggcagacacaaggagaacugcaccuggguggagagcaucguggugcugaaccugagcagcaacaugcugaccgacagcguguucagaugccugccccccagaaucaaggugcuggaccugcacagcaacaagaucaagagcgugcccaagcagguggugaagcuggaggcccugcaggagcugaacguggccuucaacagccugaccgaccugcccggcugcggcagcuucagcagccugagcgugcugaucaucgaccacaacagcgugagccaccccagcgccgacuucuuccagagcugccagaagaugagaagcaucaaggccggcgacaaccccuuccagugcaccugcgagcugagagaguucgugaagaacaucgaccaggugagcagcgaggugcuggagggcuggcccgacagcuacaagugcgacuaccccgagagcuacagaggcagcccccugaaggacuuccacaugagcgagcugagcugcaacaucacccugcugaucgugaccaucggcgccaccaugcuggugcuggccgugaccgugaccagccugugcaucuaccuggaccugcccugguaccugagaauggugugccaguggacccagaccagaagaagagccagaaacaucccccuggaggagcugcagagaaaccugcaguuccacgccuucaucagcuacagcgagcacgacagcgccugggugaagagcgagcuggugcccuaccuggagaaggaggacauccagaucugccugcacgagagaaacuucgugcccggcaagagcaucguggagaacaucaucaacugcaucgagaagagcuacaagagcaucuucgugcugagccccaacuucgugcagagcgaguggugccacuacgagcuguacuucgcccaccacaaccuguuccacgagggcagcaacaaccugauccugauccugcuggagcccaucccccagaacagcauccccaacaaguaccacaagcugaaggcccugaugacccagagaaccuaccugcaguggcccaaggagaagagcaagagaggccuguucugggccaacaucagagccgccuucaacaugaagcugacccuggugaccgagaacaacgacgugaagagcuga

SEQ ID NO: 9682 - RNA, 2391 nt, Artificial Sequence
  derived and/or modified sequence opt5 from TLR6__Homo_sapiens__ABW37070
augaccaaggacaaagagcccaucgugaaguccuuccacuuugucugccugaugauuaucauuguuggcacaagaauccaguucuccgaugggaacgaauuugccguggacaaaucuaagcggggacucauucaugugccuaaagaucugccgcuuaagacgaagguccuggacaccagccaaaauuacaucgcugagcuccagguguccgauaugucuuuccugagcgaacuuacaguucugcgccucucccacaacagaauccagcugcuggaccucucuguguuuaaauucaaucaggaucuggaguaucuugaccugagccauaaccaacuccagaagauuuccugucaccccaucgucagcuuucggcaucuggaucuuucuuucaaugacuuuaaagcccugccuauuugcaaggaguucggcaaccucucccagcugaauuuucuggggcucagcgcgaugaaacugcagaagcucgaucugcuccccaucgcucaucugcaccuuucuuacauucugcucgaccugcgcaacuauuacaucaaggagaaugagaccgaaucccugcaaauucucaacgccaaaacacugcaccuuguguuccacccuaccagccuguuugccauccagguuaauaucucugugaacacacucggaugucugcagcuuaccaauauuaagcugaacgaugacaauugccaggucuucaucaaauuccucuccgagcugacgagaggccccacccugcucaacuuuacacugaaccauauugaaaccacauggaagugucuugugcggguguuccaauuucuguggccuaaaccggucgaguaucucaauaucuacaaccugaccauuaucgagagcauccgcgaagaggacuucacguauuccaagacaacccugaaagcucuuacaauugaacacaucaccaaucagguuuuucucuucucucagaccgcccuguacacaguguuuagcgagaugaacauuaugaugcugacgaucuccgauacccccuucauucacaugcucugcccucaugcucccagcacauuuaaguuccugaauuuuacccaaaacguguucacagacucuaucuuugaaaaguguuccacccuugucaaacuggagacgcucauccugcagaagaaugggcugaaagaucuuuucaaggugggacucaugacaaaagacaugccuagccuggagauucuggauguuucuuggaacagccucgaauccggcagacacaaggagaauugcaccuggguggaaucuaucgucgugcugaaccuuagcuccaauaugcugaccgacagcguuuuccggugucuucccccgcgcauuaaggugcuggaucugcauucuaacaaaaucaaguccgucccuaaacagguggucaaacuugaggcccuccaggaacugaauguggcguuuaacagccugacagaccuccccggcugcgggucuuucuccagccuguccguucuuauuaucgaucacaauucugugagccauccuuccgccgacuuuuuccaaucuugucagaagaugagaagcauuaaggcuggagauaaccccuuucaguguaccugcgagcugcgggaguucgucaagaacaucgaccagguguccagcgaaguucucgagggcuggcccgacucuuacaaaugcgauuauccugaauccuaccgcgggagcccgcugaaggacuuucacaugucugagcuguccugcaauaucacacuucucauugugacgaucggagccaccaugcugguccuggcugugacagugaccagccucuguauuuaucuggaucuucccugguaccugagaaugguuugccaauggacacagacccggcgcagagcccggaacaucccucucgaagaacugcagagaaaucugcaguuccacgcguuuauuucuuauagcgagcaugacuccgccugggucaaaagcgaacuugugcccuaccuggagaaggaagauauccaaaucugucuccacgagcgcaacuucgugccuggcaaaucuauugucgagaauaucauuaacugcaucgaaaaguccuauaagagcauuuuugugcugucccccaauuucguucagucugaguggugucauuacgaacucuacuuugcucaccacaaccuguuccaugaggggagcaauaaccuuauccugauccuccuggaaccgauuccucagaauagcauccccaacaaauaucacaagcugaaagcccuuaugacgcagcggaccuaccugcaauggccuaaggagaaaucuaagagaggacucuucugggcuaauauucgcgccgccuuuaacaugaaacugacacucgugaccgagaauaacgacgucaagagcuga

SEQ ID NO: 9683 - protein, 796 aa, Artificial Sequence [sequence omitted]

SEQ ID NO: 9684 - RNA, 2391 nt, Artificial Sequence
  TLR6__Homo_sapiens__ABW37072
augaccaaagacaaagaaccuauuguuaaaagcuuccauuuuguuugccuuaugaucauaauaguuggaaccagaauccaguucuccgacggaaaugaauuugcaguagacaagucaaaaagaggucuuauucauguuccaaaagaccuaccgcugaaaaccaaagucuuagauaugucucagaacuacaucgcugagcuucaggucucugacaugagcuuucuaucagaguugacaguuuugagacuuucccauaacagaauccagcuacuugauuuaaguguuuucaaguucaaccaggauuuagaauauuuggauuuaucucauaaucaguugcaaaagauauccugccauccuacugugaguuucaggcauuuagaucucucauucaaugauuucaaggcccugcccaucuguaaggaauuuggcaacuuaucacaacugaauuucuugggauugagugcuaugaagcugcaaaaauuagauuugcugccaauugcucacuugcaucuaaguuauauccuucuggauuuaagaaauuauuauauaaaagaaaaugagacagaaagucuacaaauucugaaugcaaaaacccuucaccuuguuuuucacccaacuaguuuauucgcuauccaagugaacauaucaguuaauacuuuagggugcuuacaacugacuaauauuaaauugaaugaugacaacugucaaguuuucauuaaauuuuuaucagaacucaccagagguccaaccuuacugaauuuuacccucaaccacauagaaacgacuuggaaaugccuggucagagucuuucaauuucuuuggcccaaaccuguggaauaucucaauauuuacaauuuaacaauaauugaaagcauucgugaagaagauuuuacuuauucuaaaacgacauugaaagcauugacaauagaacauaucacgaaccaaguuuuucuguuuucacagacagcuuuguacaccguguuuucugagaugaacauuaugauguuaaccauuucagauacaccuuuuauacacaugcuguguccucaugcaccaagcacauucaaguuuuugaacuuuacgcagaacguuuucacagauaguauuuuugaaaaauguuccacguuaguuaaauuggagacacuuaucuuacaaaagaauggauuaaaagaccuuuucaaaguaggucucaugacgaaggauaugccuucuuuggaaauacuggauguuagcuggaauucuuuggaaucugguagacauaaggaaaacugcacuuggguugagaguauagugguguuaaauuugucuucaaauaugcuuacugacucuguuuucagauguuuaccucccaggaucaagguacuugaucuucacagcaauaaaauaaagagcauuccuaaacaagucguaaaacuggaagcuuugcaagaacucaauguugcuuucaauucuuuaacugaccuuccuggauguggcagcuuuagcagccuuucuguauugaucauugaucacaauucaguuucccacccaucggcugauuucuuccagagcugccagaagaugaggucaauaaaagcaggggacaauccauuccaauguaccugugagcuaagagaauuugucaaaaauauagaccaaguaucaagugaaguguuagagggcuggccugauucuuauaagugugacuacccagaaaguuauagaggaagcccacuaaaggacuuucacaugucugaauuauccugcaacauaacucugcugaucgucaccaucggugccaccaugcugguguuggcugugacugugaccucccucugcaucuacuuggaucugcccugguaucucaggauggugugccaguggacccagacucggcgcagggccaggaacauacccuuagaagaacuccaaagaaaccuccaguuucaugcuuuuauuucauauagugaacaugauucugccugggugaaaagugaauugguaccuuaccuagaaaaagaagauauacagauuugucuucaugagagaaacuuugucccuggcaagagcauuguggaaaauaucaucaacugcauugagaagaguuacaaguccaucuuuguuuugucucccaacuuuguccagagugaguggugccauuacgaacucuauuuugcccaucacaaucucuuucaugaaggaucuaauaacuuaauccucaucuuacuggaacccauuccacagaacagcauucccaacaaguaccacaagcugaaggcucucaugacgcagcggacuuauuugcaguggcccaaggagaaaagcaaacgugggcucuuuugggcuaacauuagagccgcuuuuaauaugaaauuaacacuagucacugaaaacaaugaugugaaaucuuaa

SEQ ID NO: 9685 - RNA, 2391 nt, Artificial Sequence
  derived and/or modified sequence opt1 from TLR6__Homo_sapiens__ABW37072
augaccaaggacaaggagcccaucgucaagagcuuccacuucgugugccugaugaucaucaucgugggcacccgcauccaguucuccgacgggaacgaguucgccguggacaagagcaagcggggccucauccacgucccgaaggaccugccccugaagacgaaggugcucgacaugucccagaacuacaucgccgagcuccaggugagcgacauguccuuccugagcgagcugaccguccugcgccugucccacaaccggauccagcuccuggaccugagcguguucaaguucaaccaggaccucgaguaccuggaccugucccacaaccagcuccagaagaucagcugccaccccaccguguccuuccgccaccuggaccugagcuucaacgacuucaaggcgcuccccaucugcaaggaguucgggaaccugucccagcugaacuuccucggccugagcgccaugaagcugcagaagcucgaccugcugccgaucgcccaccuccaccuguccuacauccugcucgaccugcggaacuacuacaucaaggagaacgagaccgagagccugcagauccucaacgccaagacgcugcaccuggucuuccaccccaccucccucuucgccauccaggugaacaucagcgugaacacccuggggugccugcagcucaccaacaucaagcugaacgacgacaacugccaggucuucaucaaguuccuguccgagcucacgcgcggccccacccugcugaacuucacccucaaccacaucgagaccacguggaagugccuggugcggguguuccaguuccuguggcccaagccggucgaguaccucaacaucuacaaccugaccaucaucgagagcauccgcgaggaggacuucaccuacagcaagaccacgcugaaggcgcugaccaucgagcacaucaccaaccagguguuccucuucucccagaccgcccuguacacgguguucagcgagaugaacaucaugaugcugaccaucuccgacacccccuucauccacaugcucugcccccacgcccccagcaccuucaaguuccugaacuucacgcagaacgucuucaccgacuccaucuucgagaagugcagcacccuggugaagcucgagacccugauccugcagaagaacggccucaaggaccuguucaagguggggcugaugacgaaggacaugccgucccucgagauccuggacgucagcuggaacucccuggagagcggccggcacaaggagaacugcaccuggguggaguccaucgugguccucaaccugagcuccaacaugcugaccgacagcguguuccgcugccucccgccccggaucaagguccuggaccugcacuccaacaagaucaagagcauccccaagcaggucgugaagcucgaggcccugcaggagcugaacguggcguucaacucccucaccgaccugcccgggugcggcagcuucuccagccugagcgugcucaucaucgaccacaacuccgugagccaccccuccgccgacuucuuccagagcugccagaagaugcgcuccaucaaggccggggacaaccccuuccagugcacgugcgagcugcgggaguucgucaagaacaucgaccaggugagcuccgaggugcuggagggcuggcccgacagcuacaagugcgacuacccggaguccuaccgcggcagcccccucaaggacuuccacauguccgagcugagcugcaacaucacccugcucaucgucaccaucggggccaccaugcuggugcuggccgugacggucaccucccucugcaucuaccuggaccugcccugguaccuccggauggugugccaguggacccagacccgccggcgcgcgcggaacaucccccuggaggagcugcagcgcaaccuccaguuccacgccuucaucagcuacuccgagcacgacagcgccugggugaaguccgagcuggucccguaccuggagaaggaggacauccagaucugccuccacgagcggaacuucgugcccggcaagagcaucguggagaacaucaucaacugcaucgagaaguccuacaagagcaucuucguccugagccccaacuucgugcaguccgaguggugccacuacgagcuguacuucgcccaccacaaccucuuccacgaggggagcaacaaccugauccugauccuccuggagcccaucccgcagaacuccauccccaacaaguaccacaagcugaaggcccucaugacccagcgcacguaccugcaguggcccaaggagaaguccaagcgcggccuguucugggcgaacauccgggccgccuucaacaugaagcucacccuggugaccgagaacaacgacgucaagagcuga

SEQ ID NO: 9686 - RNA, 2391 nt, Artificial Sequence
  derived and/or modified sequence opt2 from TLR6__Homo_sapiens__ABW37072
augaccaaggacaaggagcccaucgucaaguccuuccacuucgucugccucaugaucaucaucgucggcacccgcauccaguucuccgacggcaacgaguucgccgucgacaaguccaagcgcggccucauccacguccccaaggaccucccccucaagaccaagguccucgacaugucccagaacuacaucgccgagcuccaggucuccgacauguccuuccucuccgagcucaccguccuccgccucucccacaaccgcauccagcuccucgaccucuccgucuucaaguucaaccaggaccucgaguaccucgaccucucccacaaccagcuccagaagaucuccugccaccccaccgucuccuuccgccaccucgaccucuccuucaacgacuucaaggcccuccccaucugcaaggaguucggcaaccucucccagcucaacuuccucggccucuccgccaugaagcuccagaagcucgaccuccuccccaucgcccaccuccaccucuccuacauccuccucgaccuccgcaacuacuacaucaaggagaacgagaccgagucccuccagauccucaacgccaagacccuccaccucgucuuccaccccaccucccucuucgccauccaggucaacaucuccgucaacacccucggcugccuccagcucaccaacaucaagcucaacgacgacaacugccaggucuucaucaaguuccucuccgagcucacccgcggccccacccuccucaacuucacccucaaccacaucgagaccaccuggaagugccucguccgcgucuuccaguuccucuggcccaagcccgucgaguaccucaacaucuacaaccucaccaucaucgaguccauccgcgaggaggacuucaccuacuccaagaccacccucaaggcccucaccaucgagcacaucaccaaccaggucuuccucuucucccagaccgcccucuacaccgucuucuccgagaugaacaucaugaugcucaccaucuccgacacccccuucauccacaugcucugcccccacgcccccuccaccuucaaguuccucaacuucacccagaacgucuucaccgacuccaucuucgagaagugcuccacccucgucaagcucgagacccucauccuccagaagaacggccucaaggaccucuucaaggucggccucaugaccaaggacaugcccucccucgagauccucgacgucuccuggaacucccucgaguccggccgccacaaggagaacugcaccugggucgaguccaucgucguccucaaccucuccuccaacaugcucaccgacuccgucuuccgcugccuccccccccgcaucaagguccucgaccuccacuccaacaagaucaaguccauccccaagcaggucgucaagcucgaggcccuccaggagcucaacgucgccuucaacucccucaccgaccuccccggcugcggcuccuucuccucccucuccguccucaucaucgaccacaacuccgucucccaccccuccgccgacuucuuccaguccugccagaagaugcgcuccaucaaggccggcgacaaccccuuccagugcaccugcgagcuccgcgaguucgucaagaacaucgaccaggucuccuccgagguccucgagggcuggcccgacuccuacaagugcgacuaccccgaguccuaccgcggcuccccccucaaggacuuccacauguccgagcucuccugcaacaucacccuccucaucgucaccaucggcgccaccaugcucguccucgccgucaccgucaccucccucugcaucuaccucgaccuccccugguaccuccgcauggucugccaguggacccagacccgccgccgcgcccgcaacaucccccucgaggagcuccagcgcaaccuccaguuccacgccuucaucuccuacuccgagcacgacuccgccugggucaaguccgagcucguccccuaccucgagaaggaggacauccagaucugccuccacgagcgcaacuucguccccggcaaguccaucgucgagaacaucaucaacugcaucgagaaguccuacaaguccaucuucguccucucccccaacuucguccaguccgaguggugccacuacgagcucuacuucgcccaccacaaccucuuccacgagggcuccaacaaccucauccucauccuccucgagcccaucccccagaacuccauccccaacaaguaccacaagcucaaggcccucaugacccagcgcaccuaccuccaguggcccaaggagaaguccaagcgcggccucuucugggccaacauccgcgccgccuucaacaugaagcucacccucgucaccgagaacaacgacgucaaguccuga

SEQ ID NO: 9687 - RNA, 2391 nt, Artificial Sequence
  derived and/or modified sequence opt3 from TLR6__Homo_sapiens__ABW37072
augaccaaggacaaagagcccaucgugaaguccuuccacuuugucugccugaugauuauaaucguuggcacaaggauucaguucuccgaugggaacgaauuugccguggacaaaucuaagagaggacucauccauguaccuaaagaucuuccacugaagacuaagguguuggacaugucacaaaauuacauugcugaguuacaggucagugauaugagcuuccuguccgaacuaacggugcuccggcugucucacaaccgcauccagcuucuggacuugucgguuuuuaaauucaaucaggaucucgaguaucuggaccugucacauaaccaacuccagaagauaagcugucacccgaccgugaguuuucgacauuuagaucuguccuucaaugacuuuaaagcacuucccaucugcaaggaguucgguaacuugucucagcugaauuuucuaggccucagcgccaugaaacugcagaaacuugaucuguugccuauugcgcaccuccaccuguccuacaucuuacuggaccuccguaacuauuacauuaaggagaaugagacagaaucacuucaaauccugaacgcuaagacuuugcaucuagucuuccacccaaccagucuguuugccauacaggugaauauuagcguaaacacacucgggugucugcagcuuaccaauaucaagcugaacgaugacaauugccagguuuucauuaaauucuugucugagcucacuagaggacccacacuguuaaacuuuacccugaaccauaucgaaacgacuuggaagugucuagugagggucuuccaauuucucuggccuaaaccaguggaguaucugaauaucuacaaccuuaccauuauagaguccauccgggaagaggacuucacauauucaaagacuaccuugaaagcacugacaauugaacacaucaccaaucagguguuucucuucagccagacggcccuguacacugucuuuagugagaugaacauaaugaugcuuacaauuucugauacccccuucauccacaugcugugcccucaugcuccauccacuuuuaaguucuugaauuuuacacaaaacguuuucaccgacagcaucuuugaaaaguguucgacgcucgugaaacuggagaccuuaauucugcagaagaauggccuaaaagaucucuucaagguaggucugaugacaaaagacaugccgucucuugagaucuuggauguguccuggaacucacuggaaagugggcgccacaaggagaauugcacuugggucgaaagcauugugguucucaaccuguccucuaauauguuaaccgacagcguguucagaugucugcccccuaggauaaagguccuugauuugcauucaaacaaaaucaagaguauuccaaaacaggugguaaagcucgaggcacugcaggaacuaaauguugccuuuaacucccugacagaccuccccggaugcggcagcuucucuucacugagugugcuuaucaucgaucacaauagcgucucccauccuucugcugacuuuuuccaaucgugucagaaaaugcggagcauuaaggccggcgauaacccauuucagugcacuugcgaguugcgcgaguucgugaagaacauagaccaggucuccucagaagugcuggagggguggcccgacaguuacaaaugugauuauccggaaucuuaccgaggaagcccuuuaaaggacuuucacauguccgagcucucaugcaauaucacccugcuuauuguuacaaucggugcgaccaugcugguguuggcaguaacugucacgagccucuguauuuaucuggaucuacccugguaccugagaauggugugccaauggacacagaccaggcggcgugcccgcaacaucccacucgaagaacugcagagaaaucuucaguuccacgcuuuuauaucuuauuccgagcaugacagugccuggguuaaaagcgaauuggugccuuaccuggagaaggaagauauccaaauuuguuuacacgagaggaacuucguccccggcaaaucuaucguggagaauauuaucaacugcauagaaaaguccuauaagucaauuuuuguacucaguccaaauuucgugcagagcgaguggugucauuacgaacuguacuuugcacaccacaaccuuuuccaugaggggucgaauaaccugauccuaauucuccuggaacccaucccucagaauagcauaccaaacaaauaucacaaguugaaagcucugaugacucagcggaccuacuuacaauggccgaaggagaaaucuaagcgaggacucuucugggccaauauccgcgcggccuuuaacaugaaacugacacuuguuaccgagaauaacgacgucaagagcuga

SEQ ID NO: 9688 - RNA, 2391 nt, Artificial Sequence
  derived and/or modified sequence opt4 from TLR6__Homo_sapiens__ABW37072
augaccaaggacaaggagcccaucgugaagagcuuccacuucgugugccugaugaucaucaucgugggcaccagaauccaguucagcgacggcaacgaguucgccguggacaagagcaagagaggccugauccacgugcccaaggaccugccccugaagaccaaggugcuggacaugagccagaacuacaucgccgagcugcaggugagcgacaugagcuuccugagcgagcugaccgugcugagacugagccacaacagaauccagcugcuggaccugagcguguucaaguucaaccaggaccuggaguaccuggaccugagccacaaccagcugcagaagaucagcugccaccccaccgugagcuucagacaccuggaccugagcuucaacgacuucaaggcccugcccaucugcaaggaguucggcaaccugagccagcugaacuuccugggccugagcgccaugaagcugcagaagcuggaccugcugcccaucgcccaccugcaccugagcuacauccugcuggaccugagaaacuacuacaucaaggagaacgagaccgagagccugcagauccugaacgccaagacccugcaccugguguuccaccccaccagccuguucgccauccaggugaacaucagcgugaacacccugggcugccugcagcugaccaacaucaagcugaacgacgacaacugccagguguucaucaaguuccugagcgagcugaccagaggccccacccugcugaacuucacccugaaccacaucgagaccaccuggaagugccuggugagaguguuccaguuccuguggcccaagcccguggaguaccugaacaucuacaaccugaccaucaucgagagcaucagagaggaggacuucaccuacagcaagaccacccugaaggcccugaccaucgagcacaucaccaaccagguguuccuguucagccagaccgcccuguacaccguguucagcgagaugaacaucaugaugcugaccaucagcgacacccccuucauccacaugcugugcccccacgcccccagcaccuucaaguuccugaacuucacccagaacguguucaccgacagcaucuucgagaagugcagcacccuggugaagcuggagacccugauccugcagaagaacggccugaaggaccuguucaaggugggccugaugaccaaggacaugcccagccuggagauccuggacgugagcuggaacagccuggagagcggcagacacaaggagaacugcaccuggguggagagcaucguggugcugaaccugagcagcaacaugcugaccgacagcguguucagaugccugccccccagaaucaaggugcuggaccugcacagcaacaagaucaagagcauccccaagcagguggugaagcuggaggcccugcaggagcugaacguggccuucaacagccugaccgaccugcccggcugcggcagcuucagcagccugagcgugcugaucaucgaccacaacagcgugagccaccccagcgccgacuucuuccagagcugccagaagaugagaagcaucaaggccggcgacaaccccuuccagugcaccugcgagcugagagaguucgugaagaacaucgaccaggugagcagcgaggugcuggagggcuggcccgacagcuacaagugcgacuaccccgagagcuacagaggcagcccccugaaggacuuccacaugagcgagcugagcugcaacaucacccugcugaucgugaccaucggcgccaccaugcuggugcuggccgugaccgugaccagccugugcaucuaccuggaccugcccugguaccugagaauggugugccaguggacccagaccagaagaagagccagaaacaucccccuggaggagcugcagagaaaccugcaguuccacgccuucaucagcuacagcgagcacgacagcgccugggugaagagcgagcuggugcccuaccuggagaaggaggacauccagaucugccugcacgagagaaacuucgugcccggcaagagcaucguggagaacaucaucaacugcaucgagaagagcuacaagagcaucuucgugcugagccccaacuucgugcagagcgaguggugccacuacgagcuguacuucgcccaccacaaccuguuccacgagggcagcaacaaccugauccugauccugcuggagcccaucccccagaacagcauccccaacaaguaccacaagcugaaggcccugaugacccagagaaccuaccugcaguggcccaaggagaagagcaagagaggccuguucugggccaacaucagagccgccuucaacaugaagcugacccuggugaccgagaacaacgacgugaagagcuga

SEQ ID NO: 9689 - RNA, 2391 nt, Artificial Sequence
  derived and/or modified sequence opt5 from TLR6__Homo_sapiens__ABW37072
augaccaaggacaaagagcccaucgugaaguccuuccacuuugugugccugaugauuaucauuguuggcacaagaauccaguucuccgaugggaacgaauuugccguggacaaaucuaagcggggacucauucaugugccuaaagaucugccgcuuaagacgaagguccuggacaugagccaaaauuacaucgcugagcuccagguguccgauaugucuuuccugagcgaacuuaccguucugcgccucucccacaacagaauccagcugcuggaccucucuguguuuaaauucaaucaggaucuggaguaucuugaccugagccauaaccaacuccagaagauuuccugucaccccacagucagcuuucggcaucuggaucuuucuuucaaugacuuuaaagcccugccuaucugcaaggaguucggcaaccucucccagcugaauuuucuggggcucagcgcgaugaaacugcagaagcucgaucugcuccccauugcucaucugcaccuuucuuacauccugcucgaccugcgcaacuauuacauuaaggagaaugagaccgaaucccugcaaauccucaacgccaaaacacugcaccuuguguuccacccuaccagccuguuugccauucagguuaauaucucugugaacacacucggaugucugcagcuuaccaauaucaagcugaacgaugacaauugccaggucuucauuaaauuccucuccgagcugacgagaggccccacccugcucaacuuuacacugaaccauaucgaaaccacauggaagugucuugugcggguguuccaauuucuguggccuaaaccggucgaguaucucaauauuuacaaccugaccaucauugagagcauccgcgaagaggacuucacguauuccaagacaacccugaaagcucuuacaaucgaacacauuaccaaucagguuuuucucuucucucagaccgcccuguacacaguguuuagcgagaugaacaucaugaugcugacgauuuccgauacccccuucauccacaugcucugcccucaugcucccagcacauuuaaguuccugaauuuuacccaaaacguguucacagacucuauuuuugaaaaguguuccacccuugucaaacuggagacgcucauccugcagaagaaugggcugaaagaucuuuucaaggugggacucaugacaaaagacaugccuagccuggagauccuggauguuucuuggaacagccucgaauccggcagacacaaggagaauugcaccuggguggaaucuauugucgugcugaaccuuagcuccaauaugcugaccgacagcguuuuccggugucuucccccgcgcaucaaggugcuggaucugcauucuaacaaaauuaaguccaucccuaaacaggucgugaaacuugaggcccuccaggaacugaaugucgcguuuaacagccugacagaccuccccggcugcgggucuuucuccagccuguccgugcuuauuaucgaucacaauucuguuagccauccuuccgccgacuuuuuccaaucuugucagaagaugagaagcauuaaggcuggagauaaccccuuucaguguaccugcgagcugcgggaguucgugaagaacaucgaccaggucuccagcgaagugcucgagggcuggcccgacucuuacaaaugcgauuauccugaauccuaccgcgggagcccgcugaaggacuuucacaugucugagcuguccugcaauaucacacuucucauuguuacgaucggagccaccaugcuggugcuggcugucacagugaccagccucuguauuuaucuggaucuucccugguaccugagaauggugugccaauggacacagacccggcgcagagcccggaacaucccucucgaagaacugcagagaaaucugcaguuccacgcguuuauuucuuauagcgagcaugacuccgccuggguuaaaagcgaacuuguccccuaccuggagaaggaagauauccaaaucugucuccacgagcgcaacuucgugccuggcaaaucuauuguggagaauaucauuaacugcaucgaaaaguccuauaagagcauuuuuguccugucccccaauuucgugcagucugaguggugucauuacgaacucuacuuugcucaccacaaccuguuccaugaggggagcaauaaccuuauccugauccuccuggaaccgauuccucagaauagcauccccaacaaauaucacaagcugaaagcccuuaugacgcagcggaccuaccugcaauggccuaaggagaaaucuaagagaggacucuucugggcuaauauucgcgccgccuuuaacaugaaacugacacucguuaccgagaauaacgacgucaagagcuga

SEQ ID NO: 9690 - protein, 796 aa, Artificial Sequence [sequence omitted]

SEQ ID NO: 9691 - RNA, 2391 nt, Artificial Sequence
  TLR6__Homo_sapiens__ABW37073
augaccaaagacaaagaaccuauuguuaaaagcuuccauuuuguuugccuuaugaucauaauaguuggaaccagaauccaguucuccgacggaaaugaauuugcaguagacaagucaaaaagaggucuuauucauguuccaaaagaccuaccgcugaaaaccaaagucuuagauaugucucagaacuacaucgcugagcuucaggucucugacaugagcuuucuaucagaguugacaguuuugagacuuucccauaacagaauccagcuacuugauuuaaguguuuucaaguucaaccaggauuuagaauauuuggauuuaucucauaaucaguugcaaaagauauccugccauccuacugugaguuucaggcauuuagaucucucauucaaugauuucaaggcccugcccaucuguaaggaauuuggcaacuuaucacaacugaauuucuugggauugagugcuaugaagcugcaaaaauuagauuugcugccaauugcucacuugcaucuaaguuauauccuucuggauuuaagaaauuauuauauaaaagaaaaugagacagaaagucuacaaauucugaaugcaaaaacccuucaccuuguuuuucacccaacuaguuuauucgcuauccaagugaacauaucaguuaauacuuuagggugcuuacaacugacuaauauuaaauugaaugaugacaacugucaaguuuucauuaaauuuuuaucagaacucaccagagguccaaccuuacugaauuuuacccucaaccacauagaaacgacuuggaaaugccuggucagagucuuucaauuucuuuggcccaaaccuguggaauaucucaauauuuacaauuuaacaauaauugaaagcauucgugaagaagauuuuacuuauucuaaaacgacauugaaagcauugacaauagaacauaucacgaaccaaguuuuucuguuuucacagacagcuuuguacaccauguuuucugagaugaacauuaugauguuaaccauuucagauacaccuuuuauacacaugcuguguccucaugcaccaagcacauucaaguuuuugaacuuuacgcagaacguuuucacagauaguauuuuugaaaaauguuccacguuaguuaaauuggagacacuuaucuuacaaaagaauggauuaaaagaccuuuucaaaguaggucucaugacgaaggauaugccuucuuuggaaauacuggauguuagcuggaauucuuuggaaucugguagacauaaggaaaacugcacuuggguugagaguauagugguguuaaauuugucuucaaauaugcuuacugacucuguuuucagauguuuaccucccaggaucaagguacuugaucuucacagcaauaaaauaaagagcguuccuaaacaagucguaaaacuggaagcuuugcaagaacucaauguugcuuucaauucuuuaacugaccuuccuggauguggcagcuuuagcagccuuucuguauugaucauugaucacaauucaguuucccacccaucggcugauuucuuccagagcugccagaagaugaggucaauaaaagcaggggacaauccauuccaauguaccugugagcuaagagaauuugucaaaaauauagaccaaguaucaagugaaguguuagagggcuggccugauucuuauaagugugacuacccagaaaguuauagaggaagcccacuaaaggacuuucacaugucugaauuauccugcaacauaacucugcugaucgucaccaucggugccaccaugcugguguuggcugugacugugaccucccucugcaucuacuuggaucugcccugguaucucaggauggugugccaguggacccagacucggcgcagggccaggaacauacccuuagaagaacuccaaagaaaccuccaguuucaugcuuuuauuucauauagugaacaugauucugccugggugaaaagugaauugguaccuuaccuagaaaaagaagauauacagauuugucuucaugagagaaacuuugucccuggcaagagcauuguggaaaauaucaucaacugcauugagaagaguuacaaguccaucuuuguuuugucucccaacuuuguccagagugaguggugccauuacgaacucuauuuugcccaucacaaucucuuucaugaaggaucuaauaacuuaauccucaucuuacuggaacccauuccacagaacagcauucccaacaaguaccacaagcugaaggcucucaugacgcagcggacuuauuugcaguggcccaaggagaaaagcaaacgugggcucuuuugggcuaacauuagagccgcuuuuaauaugaaauuaacacuagucacugaaaacaaugaugugaaaucuuaa

SEQ ID NO: 9692 - RNA, 2391 nt, Artificial Sequence
  derived and/or modified sequence opt1 from TLR6__Homo_sapiens__ABW37073
augaccaaggacaaggagcccaucgucaagagcuuccacuucgugugccugaugaucaucaucgugggcacccgcauccaguucuccgacgggaacgaguucgccguggacaagagcaagcggggccucauccacgucccgaaggaccugccccugaagacgaaggugcucgacaugucccagaacuacaucgccgagcuccaggugagcgacauguccuuccugagcgagcugaccguccugcgccugucccacaaccggauccagcuccuggaccugagcguguucaaguucaaccaggaccucgaguaccuggaccugucccacaaccagcuccagaagaucagcugccaccccaccguguccuuccgccaccuggaccugagcuucaacgacuucaaggcgcuccccaucugcaaggaguucgggaaccugucccagcugaacuuccucggccugagcgccaugaagcugcagaagcucgaccugcugccgaucgcccaccuccaccuguccuacauccugcucgaccugcggaacuacuacaucaaggagaacgagaccgagagccugcagauccucaacgccaagacgcugcaccuggucuuccaccccaccucccucuucgccauccaggugaacaucagcgugaacacccuggggugccugcagcucaccaacaucaagcugaacgacgacaacugccaggucuucaucaaguuccuguccgagcucacgcgcggccccacccugcugaacuucacccucaaccacaucgagaccacguggaagugccuggugcggguguuccaguuccuguggcccaagccggucgaguaccucaacaucuacaaccugaccaucaucgagagcauccgcgaggaggacuucaccuacagcaagaccacgcugaaggcgcugaccaucgagcacaucaccaaccagguguuccucuucucccagaccgcccuguacacgauguucagcgagaugaacaucaugaugcugaccaucuccgacacccccuucauccacaugcucugcccccacgcccccagcaccuucaaguuccugaacuucacgcagaacguguucaccgacuccaucuucgagaagugcagcacccuggucaagcucgagacccugauccugcagaagaacggccucaaggaccuguucaagguggggcugaugacgaaggacaugccgucccucgagauccuggacgugagcuggaacucccuggagagcggccggcacaaggagaacugcaccugggucgaguccaucguggugcucaaccugagcuccaacaugcugaccgacagcgucuuccgcugccucccgccccggaucaaggugcuggaccugcacuccaacaagaucaagagcguccccaagcaggucgugaagcucgaggcccugcaggagcugaacguggcguucaacucccucaccgaccugcccgggugcggcagcuucuccagccugagcgugcucaucaucgaccacaacuccgugagccaccccuccgccgacuucuuccagagcugccagaagaugcgcuccaucaaggccggggacaaccccuuccagugcacgugcgagcugcgggaguucgucaagaacaucgaccaggugagcuccgaggugcuggagggcuggcccgacagcuacaagugcgacuacccggaguccuaccgcggcagcccccucaaggacuuccacauguccgagcugagcugcaacaucacccugcucaucgucaccaucggggccaccaugcuggugcuggccgugacggucaccucccucugcaucuaccuggaccugcccugguaccuccggauggugugccaguggacccagacccgccggcgcgcgcggaacaucccccuggaggagcugcagcgcaaccuccaguuccacgccuucaucagcuacuccgagcacgacagcgccugggugaaguccgagcuggucccguaccuggagaaggaggacauccagaucugccuccacgagcggaacuucgugcccggcaagagcaucguggagaacaucaucaacugcaucgagaaguccuacaagagcaucuucguccugagccccaacuucgugcaguccgaguggugccacuacgagcuguacuucgcccaccacaaccucuuccacgaggggagcaacaaccugauccugauccuccuggagcccaucccgcagaacuccauccccaacaaguaccacaagcugaaggcccucaugacccagcgcacguaccugcaguggcccaaggagaaguccaagcgcggccuguucugggcgaacauccgggccgccuucaacaugaagcucacccuggugaccgagaacaacgacgucaagagcuga

SEQ ID NO: 9693 - RNA, 2391 nt, Artificial Sequence
  derived and/or modified sequence opt2 from TLR6__Homo_sapiens__ABW37073
augaccaaggacaaggagcccaucgucaaguccuuccacuucgucugccucaugaucaucaucgucggcacccgcauccaguucuccgacggcaacgaguucgccgucgacaaguccaagcgcggccucauccacguccccaaggaccucccccucaagaccaagguccucgacaugucccagaacuacaucgccgagcuccaggucuccgacauguccuuccucuccgagcucaccguccuccgccucucccacaaccgcauccagcuccucgaccucuccgucuucaaguucaaccaggaccucgaguaccucgaccucucccacaaccagcuccagaagaucuccugccaccccaccgucuccuuccgccaccucgaccucuccuucaacgacuucaaggcccuccccaucugcaaggaguucggcaaccucucccagcucaacuuccucggccucuccgccaugaagcuccagaagcucgaccuccuccccaucgcccaccuccaccucuccuacauccuccucgaccuccgcaacuacuacaucaaggagaacgagaccgagucccuccagauccucaacgccaagacccuccaccucgucuuccaccccaccucccucuucgccauccaggucaacaucuccgucaacacccucggcugccuccagcucaccaacaucaagcucaacgacgacaacugccaggucuucaucaaguuccucuccgagcucacccgcggccccacccuccucaacuucacccucaaccacaucgagaccaccuggaagugccucguccgcgucuuccaguuccucuggcccaagcccgucgaguaccucaacaucuacaaccucaccaucaucgaguccauccgcgaggaggacuucaccuacuccaagaccacccucaaggcccucaccaucgagcacaucaccaaccaggucuuccucuucucccagaccgcccucuacaccauguucuccgagaugaacaucaugaugcucaccaucuccgacacccccuucauccacaugcucugcccccacgcccccuccaccuucaaguuccucaacuucacccagaacgucuucaccgacuccaucuucgagaagugcuccacccucgucaagcucgagacccucauccuccagaagaacggccucaaggaccucuucaaggucggccucaugaccaaggacaugcccucccucgagauccucgacgucuccuggaacucccucgaguccggccgccacaaggagaacugcaccugggucgaguccaucgucguccucaaccucuccuccaacaugcucaccgacuccgucuuccgcugccuccccccccgcaucaagguccucgaccuccacuccaacaagaucaaguccguccccaagcaggucgucaagcucgaggcccuccaggagcucaacgucgccuucaacucccucaccgaccuccccggcugcggcuccuucuccucccucuccguccucaucaucgaccacaacuccgucucccaccccuccgccgacuucuuccaguccugccagaagaugcgcuccaucaaggccggcgacaaccccuuccagugcaccugcgagcuccgcgaguucgucaagaacaucgaccaggucuccuccgagguccucgagggcuggcccgacuccuacaagugcgacuaccccgaguccuaccgcggcuccccccucaaggacuuccacauguccgagcucuccugcaacaucacccuccucaucgucaccaucggcgccaccaugcucguccucgccgucaccgucaccucccucugcaucuaccucgaccuccccugguaccuccgcauggucugccaguggacccagacccgccgccgcgcccgcaacaucccccucgaggagcuccagcgcaaccuccaguuccacgccuucaucuccuacuccgagcacgacuccgccugggucaaguccgagcucguccccuaccucgagaaggaggacauccagaucugccuccacgagcgcaacuucguccccggcaaguccaucgucgagaacaucaucaacugcaucgagaaguccuacaaguccaucuucguccucucccccaacuucguccaguccgaguggugccacuacgagcucuacuucgcccaccacaaccucuuccacgagggcuccaacaaccucauccucauccuccucgagcccaucccccagaacuccauccccaacaaguaccacaagcucaaggcccucaugacccagcgcaccuaccuccaguggcccaaggagaaguccaagcgcggccucuucugggccaacauccgcgccgccuucaacaugaagcucacccucgucaccgagaacaacgacgucaaguccuga

SEQ ID NO: 9694 - RNA, 2391 nt, Artificial Sequence
  derived and/or modified sequence opt3 from TLR6__Homo_sapiens__ABW37073
augaccaaggacaaagagcccaucgugaaguccuuccacuuugucugccugaugauuauaaucguuggcacaaggauucaguucuccgaugggaacgaauuugccguggacaaaucuaagagaggacucauccauguaccuaaagaucuuccacugaagacuaagguguuggacaugucacaaaauuacauugcugaguuacaggucagugauaugagcuuccuguccgaacuaacggugcuccggcugucucacaaccgcauccagcuucuggacuugucgguuuuuaaauucaaucaggaucucgaguaucuggaccugucacauaaccaacuccagaagauaagcugucacccgaccgugaguuuucgacauuuagaucuguccuucaaugacuuuaaagcacuucccaucugcaaggaguucgguaacuugucucagcugaauuuucuaggccucagcgccaugaaacugcagaaacuugaucuguugccuauugcgcaccuccaccuguccuacaucuuacuggaccuccguaacuauuacauuaaggagaaugagacagaaucacuucaaauccugaacgcuaagacuuugcaucuagucuuccacccaaccagucuguuugccauacaggugaauauuagcguaaacacacucgggugucugcagcuuaccaauaucaagcugaacgaugacaauugccagguuuucauuaaauucuugucugagcucacuagaggacccacacuguuaaacuuuacccugaaccauaucgaaacgacuuggaagugucuagugagggucuuccaauuucucuggccuaaaccaguggaguaucugaauaucuacaaccuuaccauuauagaguccauccgggaagaggacuucacauauucaaagacuaccuugaaagcacugacaauugaacacaucaccaaucagguguuucucuucagccagacggcccuguacacuauguuuagugagaugaacauaaugaugcuuacaauuucugauacccccuucauccacaugcugugcccucaugcuccauccacuuuuaaguucuugaauuuuacacaaaacgucuucaccgacagcaucuuugaaaaguguucgacgcucguuaaacuggagaccuuaauucugcagaagaauggccuaaaagaucucuucaaggugggucugaugacaaaagacaugccgucucuugagaucuuggauguauccuggaacucacuggaaagugggcgccacaaggagaauugcacuuggguggaaagcauugucgugcucaaccuguccucuaauauguuaaccgacagcguuuucagaugucugcccccuaggauaaaggugcuugauuugcauucaaacaaaaucaagagugucccaaaacaggugguaaagcucgaggcacugcaggaacuaaauguugccuuuaacucccugacagaccuccccggaugcggcagcuucucuucacugagugugcuuauuaucgaucacaauagcgucucccauccuucugcugacuuuuuccaaucgugucagaaaaugcggagcaucaaggccggcgauaacccauuucagugcacuugcgaguugcgcgaguucgugaagaacauugaccaggucuccucagaagugcuggagggguggcccgacaguuacaaaugugauuauccggaaucuuaccgaggaagcccuuuaaaggacuuucacauguccgagcucucaugcaauauaacccugcuuaucguuacaauuggugcgaccaugcugguguuggcaguaacugucacgagccucuguaucuaucuggaucuacccugguaccugagaauggugugccaauggacacagaccaggcggcgugcccgcaacauuccacucgaagaacugcagagaaaucuucaguuccacgcuuuuaucucuuauuccgagcaugacagugccuggguuaaaagcgaauuggugccuuaccuggagaaggaagauauacaaaucuguuuacacgagaggaacuucguccccggcaaaucuauuguggagaauaucauuaacugcaucgaaaaguccuauaagucaauauuuguacucaguccaaauuucgugcagagcgaguggugucauuacgaacuguacuuugcacaccacaaccuuuuccaugaggggucgaauaaccugauucuaauccuccuggaacccauuccucagaauagcaucccaaacaaauaucacaaguugaaagcucugaugacucagcggaccuacuuacaauggccgaaggagaaaucuaagcgaggacucuucugggccaauauacgcgcggccuuuaacaugaaacugacacuuguuaccgagaauaacgacgucaagagcuga

SEQ ID NO: 9695 - RNA, 2391 nt, Artificial Sequence
  derived and/or modified sequence opt4 from TLR6__Homo_sapiens__ABW37073
augaccaaggacaaggagcccaucgugaagagcuuccacuucgugugccugaugaucaucaucgugggcaccagaauccaguucagcgacggcaacgaguucgccguggacaagagcaagagaggccugauccacgugcccaaggaccugccccugaagaccaaggugcuggacaugagccagaacuacaucgccgagcugcaggugagcgacaugagcuuccugagcgagcugaccgugcugagacugagccacaacagaauccagcugcuggaccugagcguguucaaguucaaccaggaccuggaguaccuggaccugagccacaaccagcugcagaagaucagcugccaccccaccgugagcuucagacaccuggaccugagcuucaacgacuucaaggcccugcccaucugcaaggaguucggcaaccugagccagcugaacuuccugggccugagcgccaugaagcugcagaagcuggaccugcugcccaucgcccaccugcaccugagcuacauccugcuggaccugagaaacuacuacaucaaggagaacgagaccgagagccugcagauccugaacgccaagacccugcaccugguguuccaccccaccagccuguucgccauccaggugaacaucagcgugaacacccugggcugccugcagcugaccaacaucaagcugaacgacgacaacugccagguguucaucaaguuccugagcgagcugaccagaggccccacccugcugaacuucacccugaaccacaucgagaccaccuggaagugccuggugagaguguuccaguuccuguggcccaagcccguggaguaccugaacaucuacaaccugaccaucaucgagagcaucagagaggaggacuucaccuacagcaagaccacccugaaggcccugaccaucgagcacaucaccaaccagguguuccuguucagccagaccgcccuguacaccauguucagcgagaugaacaucaugaugcugaccaucagcgacacccccuucauccacaugcugugcccccacgcccccagcaccuucaaguuccugaacuucacccagaacguguucaccgacagcaucuucgagaagugcagcacccuggugaagcuggagacccugauccugcagaagaacggccugaaggaccuguucaaggugggccugaugaccaaggacaugcccagccuggagauccuggacgugagcuggaacagccuggagagcggcagacacaaggagaacugcaccuggguggagagcaucguggugcugaaccugagcagcaacaugcugaccgacagcguguucagaugccugccccccagaaucaaggugcuggaccugcacagcaacaagaucaagagcgugcccaagcagguggugaagcuggaggcccugcaggagcugaacguggccuucaacagccugaccgaccugcccggcugcggcagcuucagcagccugagcgugcugaucaucgaccacaacagcgugagccaccccagcgccgacuucuuccagagcugccagaagaugagaagcaucaaggccggcgacaaccccuuccagugcaccugcgagcugagagaguucgugaagaacaucgaccaggugagcagcgaggugcuggagggcuggcccgacagcuacaagugcgacuaccccgagagcuacagaggcagcccccugaaggacuuccacaugagcgagcugagcugcaacaucacccugcugaucgugaccaucggcgccaccaugcuggugcuggccgugaccgugaccagccugugcaucuaccuggaccugcccugguaccugagaauggugugccaguggacccagaccagaagaagagccagaaacaucccccuggaggagcugcagagaaaccugcaguuccacgccuucaucagcuacagcgagcacgacagcgccugggugaagagcgagcuggugcccuaccuggagaaggaggacauccagaucugccugcacgagagaaacuucgugcccggcaagagcaucguggagaacaucaucaacugcaucgagaagagcuacaagagcaucuucgugcugagccccaacuucgugcagagcgaguggugccacuacgagcuguacuucgcccaccacaaccuguuccacgagggcagcaacaaccugauccugauccugcuggagcccaucccccagaacagcauccccaacaaguaccacaagcugaaggcccugaugacccagagaaccuaccugcaguggcccaaggagaagagcaagagaggccuguucugggccaacaucagagccgccuucaacaugaagcugacccuggugaccgagaacaacgacgugaagagcuga

SEQ ID NO: 9696 - RNA, 2391 nt, Artificial Sequence
  derived and/or modified sequence opt5 from TLR6__Homo_sapiens__ABW37073
augaccaaggacaaagagcccaucgugaaguccuuccacuuugugugccugaugauuaucauuguuggcacaagaauccaguucuccgaugggaacgaauuugccguggacaaaucuaagcggggacucauucaugugccuaaagaucugccgcuuaagacgaagguccuggacaugagccaaaauuacaucgcugagcuccagguguccgauaugucuuuccugagcgaacuuaccguucugcgccucucccacaacagaauccagcugcuggaccucucuguguuuaaauucaaucaggaucuggaguaucuugaccugagccauaaccaacuccagaagauuuccugucaccccacagucagcuuucggcaucuggaucuuucuuucaaugacuuuaaagcccugccuaucugcaaggaguucggcaaccucucccagcugaauuuucuggggcucagcgcgaugaaacugcagaagcucgaucugcuccccauugcucaucugcaccuuucuuacauccugcucgaccugcgcaacuauuacauuaaggagaaugagaccgaaucccugcaaauccucaacgccaaaacacugcaccuuguguuccacccuaccagccuguuugccauucagguuaauaucucugugaacacacucggaugucugcagcuuaccaauaucaagcugaacgaugacaauugccaggucuucauuaaauuccucuccgagcugacgagaggccccacccugcucaacuuuacacugaaccauaucgaaaccacauggaagugucuugugcggguguuccaauuucuguggccuaaaccggucgaguaucucaauauuuacaaccugaccaucauugagagcauccgcgaagaggacuucacguauuccaagacaacccugaaagcucuuacaaucgaacacauuaccaaucagguuuuucucuucucucagaccgcccuguacacaauguuuagcgagaugaacaucaugaugcugacgauuuccgauacccccuucauccacaugcucugcccucaugcucccagcacauuuaaguuccugaauuuuacccaaaacguguucacagacucuauuuuugaaaaguguuccacccuugugaaacuggagacgcucauccugcagaagaaugggcugaaagaucuuuucaaggucggacucaugacaaaagacaugccuagccuggagauccuggaugugucuuggaacagccucgaauccggcagacacaaggagaauugcaccuggguugaaucuauugugguccugaaccuuagcuccaauaugcugaccgacagcguguuccggugucuucccccgcgcaucaagguucuggaucugcauucuaacaaaauuaaguccgugccuaaacaggucgugaaacuugaggcccuccaggaacugaaugucgcguuuaacagccugacagaccuccccggcugcgggucuuucuccagccuguccgugcuuaucauugaucacaauucuguuagccauccuuccgccgacuuuuuccaaucuugucagaagaugagaagcaucaaggcuggagauaaccccuuucaguguaccugcgagcugcgggaguucgugaagaacauugaccaggucuccagcgaagugcucgagggcuggcccgacucuuacaaaugcgauuauccugaauccuaccgcgggagcccgcugaaggacuuucacaugucugagcuguccugcaauaucacacuucucaucguuacgauuggagccaccaugcuggugcuggcugucacagugaccagccucuguaucuaucuggaucuucccugguaccugagaauggugugccaauggacacagacccggcgcagagcccggaacauuccucucgaagaacugcagagaaaucugcaguuccacgcguuuaucucuuauagcgagcaugacuccgccuggguuaaaagcgaacuuguccccuaccuggagaaggaagauauucaaaucugucuccacgagcgcaacuucgugccuggcaaaucuaucguggagaauauuaucaacugcauugaaaaguccuauaagagcaucuuuguccugucccccaauuucgugcagucugaguggugucauuacgaacucuacuuugcucaccacaaccuguuccaugaggggagcaauaaccuuauucugauccuccuggaaccgaucccucagaauagcauucccaacaaauaucacaagcugaaagcccuuaugacgcagcggaccuaccugcaauggccuaaggagaaaucuaagagaggacucuucugggcuaauauccgcgccgccuuuaacaugaaacugacacucguuaccgagaauaacgacgucaagagcuga

SEQ ID NO: 9697 - protein, 796 aa, Artificial Sequence [sequence omitted]

SEQ ID NO: 9698 - RNA, 2391 nt, Artificial Sequence
  TLR6__Homo_sapiens__ABY67116
augaccaaagacaaagaaccuauuguuaaaagcuuccauuuuguuugccuuaugaucauaauaguuggaaccagaauccaguucuccgacggaaaugaauuugcaguagacaagucaaaaagaggucuuauucauguuccaaaagaccuaccgcugaaaaccaaagucuuagauaugucucagaacuacaucgcugagcuucaggucucugacaugagcuuucuaucagaguugacaguuuugagacuuucccauaacagaauccagcuacuugauuuaaguguuuucaaguucaaccaggauuuagaauauuuggauuuaucucauaaucaguugcaaaagauauccugccauccuauugugaguuucaggcauuuagaucucucauucaaugauuucaaggcccugcccaucuguaaggaauuuggcaacuuaucacaacugaauuucuugggauugagugcuaugaagcugcaaaaauuagauuugcugccaauugcucacuugcaucuaaguuauauccuucuggauuuaagaaauuauuauauaaaagaaaaugagacagaaagucuacaaauucugaaugcaaaaacccuucaccuuguuuuucacccaacuaguuuauucgcuauccaagugaacauaucaguuaauacuuuagggugcuuacaacugacuaauauuaaauugaaugaugacaacugucaaguuuucauuaaauuuuuaucagaacucaccagagguccaaccuuacugaauuuuacccucaaccacauagaaacgacuuggaaaugccuggucagagucuuucaauuucuuuggcccaaaccuguggaauaucucaauauuuacaauuuaacaauaauugaaagcauucgugaagaagauuuuacuuauucuaaaacgacauugaaagcauugacaauagaacauaucacgaaccaaguuuuucuguuuucacagacagcuuuguacaccguguuuucugagaugaacauuaugauguuaaccauuucagauacaccuuuuauacacaugcuguguccucaugcaccaagcacauucaaguuuuugaacuuuacgcagaacguuuucacagauaguauuuuugaaaaauguuccacguuaguuaaauuggagacacuuaucuuacaaaagaauggauuaaaagaccuuuucaaaguaggucucaugacgaaggauaugccuucuuuggaaauacuggauguuagcuggaauucuuuggaaucugguagacauaaggaaaacugcacuuggguugagaguauagugguguuaaauuugucuucaaauaugcuuacugacucuguuuucagauguuuaccucccaggaucaagguacuugaucuucacagcaauaaaauaaagagcauuccuaaacaagucuuaaaacuggaagcuuugcaagaacucaauguugcuuucaauucuuuaacugaccuuccuggauguggcagcuuuagcagccuuucuguauugaucauugaucacaauucaguuucccacccaucggcugauuucuuccagagcugccagaagaugaggucaauaaaagcaggggacaauccauuccaauguaccugugagcuaagagaauuugucaaaaauauagaccaaguaucaagugaaguguuagagggcuggccugauucuuauaagugugacuacccagaaaguuauagaggaagcccacuaaaggacuuucacaugucugaauuauccugcaacauaacucugcugaucgucaccaucggugccaccaugcugguguuggcugugacugugaccucccucugcaucuacuuggaucugcccugguaucucaggauggugugccaguggacccagacucggcgcagggccaggaacauacccuuagaagaacuccaaagaaaccuccaguuucaugcuuuuauuucauauagugaacaugauucugccugggugaaaagugaauugguaccuuaccuagaaaaagaagauauacagauuugucuucaugagagaaacuuugucccuggcaagagcauuguggaaaauaucaucaacugcauugagaagaguuacaaguccaucuuuguuuugucucccaacuuuguccagagugaguggugccauuacgaacucuauuuugcccaucacaaucucuuucaugaaggaucuaauaacuuaauccucaucuuacuggaacccauuccacagaacagcauucccaacaaguaccacaagcugaaggcucucaugacgcagcggacuuauuugcaguggcccaaggagaaaagcaaacgugggcucuuuugggcuaacauuagagccgcuuuuaauaugaaauuaacacuagucacugaaaacaaugaugugaaaucuuaa

SEQ ID NO: 9699 - RNA, 2391 nt, Artificial Sequence
  derived and/or modified sequence opt1 from TLR6__Homo_sapiens__ABY67116
augaccaaggacaaggagcccaucgucaagagcuuccacuucgugugccugaugaucaucaucgugggcacccgcauccaguucagcgacgggaacgaguucgccguggacaagagcaagcggggccucauccacgucccgaaggaccugccccugaagacgaaggugcucgacaugucccagaacuacaucgccgagcuccaggugagcgacauguccuuccugagcgagcugaccguccugcgccugucccacaaccggauccagcuccuggaccugagcguguucaaguucaaccaggaccucgaguaccuggaccugucccacaaccagcuccagaagaucagcugccaccccaucguguccuuccgccaccuggaccugagcuucaacgacuucaaggcgcuccccaucugcaaggaguucgggaaccugucccagcugaacuuccucggccugagcgccaugaagcugcagaagcucgaccugcugccgaucgcccaccuccaccuguccuacauccugcucgaccugcggaacuacuacaucaaggagaacgagaccgagagccugcagauccucaacgccaagacccugcaccuggucuuccaccccacgucccucuucgccauccaggugaacaucagcgugaacacccuggggugccugcagcucaccaacaucaagcugaacgacgacaacugccaggucuucaucaaguuccuguccgagcucacccgcggccccacgcugcugaacuucacccucaaccacaucgagaccaccuggaagugccuggugcggguguuccaguuccuguggcccaagccggucgaguaccucaacaucuacaaccugacgaucaucgagagcauccgcgaggaggacuucaccuacagcaagaccacccugaaggcgcugacgaucgagcacaucaccaaccagguguuccucuucucccagaccgcccuguacaccguguucagcgagaugaacaucaugaugcugacgaucuccgacacccccuucauccacaugcucugcccccacgcccccagcaccuucaaguuccugaacuucacccagaacgucuucacggacuccaucuucgagaagugcagcacccuggugaagcucgagacccugauccugcagaagaacggccucaaggaccuguucaagguggggcugaugaccaaggacaugccgucccucgagauccuggacgucagcuggaacucccuggagagcggccggcacaaggagaacugcacguggguggaguccaucgugguccucaaccugagcuccaacaugcugaccgacagcguguuccgcugccucccgccccggaucaagguccuggaccugcacuccaacaagaucaagagcauccccaagcagguccucaagcuggaggcccugcaggagcucaacguggcguucaacucccugaccgaccugcccgggugcggcagcuucuccagccucagcgugcugaucaucgaccacaacuccgugagccaccccuccgccgacuucuuccagagcugccagaagaugcgcuccaucaaggccggggacaaccccuuccagugcacgugcgagcugcgggaguucgugaagaacaucgaccaggucagcuccgaggugcucgagggcuggcccgacagcuacaagugcgacuacccggaguccuaccgcggcagcccccugaaggacuuccacauguccgagcugagcugcaacaucacccuccugaucgugaccaucggggccaccaugcugguccucgccgugaccgugacgucccugugcaucuaccuggaccuccccugguaccugcggauggucugccaguggacccagacccgccggcgcgcgcggaacaucccccuggaggagcuccagcgcaaccugcaguuccacgccuucaucagcuacuccgagcacgacagcgccugggugaaguccgagcuggugccguaccucgagaaggaggacauccagaucugccugcacgagcggaacuucguccccggcaagagcaucguggagaacaucaucaacugcaucgagaaguccuacaagagcaucuucgugcugagccccaacuucguccaguccgaguggugccacuacgagcucuacuucgcccaccacaaccuguuccacgaggggagcaacaaccugauccucauccugcuggagcccaucccgcagaacuccauccccaacaaguaccacaagcucaaggcccugaugacccagcgcaccuaccugcaguggcccaaggagaaguccaagcgcggccucuucugggcgaacauccgggccgccuucaacaugaagcugacgcuggugaccgagaacaacgacgugaaguccuga

SEQ ID NO: 9700 - RNA, 2391 nt, Artificial Sequence
  derived and/or modified sequence opt2 from TLR6__Homo_sapiens__ABY67116
augaccaaggacaaggagcccaucgucaaguccuuccacuucgucugccucaugaucaucaucgucggcacccgcauccaguucuccgacggcaacgaguucgccgucgacaaguccaagcgcggccucauccacguccccaaggaccucccccucaagaccaagguccucgacaugucccagaacuacaucgccgagcuccaggucuccgacauguccuuccucuccgagcucaccguccuccgccucucccacaaccgcauccagcuccucgaccucuccgucuucaaguucaaccaggaccucgaguaccucgaccucucccacaaccagcuccagaagaucuccugccaccccaucgucuccuuccgccaccucgaccucuccuucaacgacuucaaggcccuccccaucugcaaggaguucggcaaccucucccagcucaacuuccucggccucuccgccaugaagcuccagaagcucgaccuccuccccaucgcccaccuccaccucuccuacauccuccucgaccuccgcaacuacuacaucaaggagaacgagaccgagucccuccagauccucaacgccaagacccuccaccucgucuuccaccccaccucccucuucgccauccaggucaacaucuccgucaacacccucggcugccuccagcucaccaacaucaagcucaacgacgacaacugccaggucuucaucaaguuccucuccgagcucacccgcggccccacccuccucaacuucacccucaaccacaucgagaccaccuggaagugccucguccgcgucuuccaguuccucuggcccaagcccgucgaguaccucaacaucuacaaccucaccaucaucgaguccauccgcgaggaggacuucaccuacuccaagaccacccucaaggcccucaccaucgagcacaucaccaaccaggucuuccucuucucccagaccgcccucuacaccgucuucuccgagaugaacaucaugaugcucaccaucuccgacacccccuucauccacaugcucugcccccacgcccccuccaccuucaaguuccucaacuucacccagaacgucuucaccgacuccaucuucgagaagugcuccacccucgucaagcucgagacccucauccuccagaagaacggccucaaggaccucuucaaggucggccucaugaccaaggacaugcccucccucgagauccucgacgucuccuggaacucccucgaguccggccgccacaaggagaacugcaccugggucgaguccaucgucguccucaaccucuccuccaacaugcucaccgacuccgucuuccgcugccuccccccccgcaucaagguccucgaccuccacuccaacaagaucaaguccauccccaagcagguccucaagcucgaggcccuccaggagcucaacgucgccuucaacucccucaccgaccuccccggcugcggcuccuucuccucccucuccguccucaucaucgaccacaacuccgucucccaccccuccgccgacuucuuccaguccugccagaagaugcgcuccaucaaggccggcgacaaccccuuccagugcaccugcgagcuccgcgaguucgucaagaacaucgaccaggucuccuccgagguccucgagggcuggcccgacuccuacaagugcgacuaccccgaguccuaccgcggcuccccccucaaggacuuccacauguccgagcucuccugcaacaucacccuccucaucgucaccaucggcgccaccaugcucguccucgccgucaccgucaccucccucugcaucuaccucgaccuccccugguaccuccgcauggucugccaguggacccagacccgccgccgcgcccgcaacaucccccucgaggagcuccagcgcaaccuccaguuccacgccuucaucuccuacuccgagcacgacuccgccugggucaaguccgagcucguccccuaccucgagaaggaggacauccagaucugccuccacgagcgcaacuucguccccggcaaguccaucgucgagaacaucaucaacugcaucgagaaguccuacaaguccaucuucguccucucccccaacuucguccaguccgaguggugccacuacgagcucuacuucgcccaccacaaccucuuccacgagggcuccaacaaccucauccucauccuccucgagcccaucccccagaacuccauccccaacaaguaccacaagcucaaggcccucaugacccagcgcaccuaccuccaguggcccaaggagaaguccaagcgcggccucuucugggccaacauccgcgccgccuucaacaugaagcucacccucgucaccgagaacaacgacgucaaguccuga

SEQ ID NO: 9701 - RNA, 2391 nt, Artificial Sequence
  derived and/or modified sequence opt3 from TLR6__Homo_sapiens__ABY67116
augaccaaggacaaagagcccaucgucaagagcuuccacuuugugugccugaugauuauaaucguuggcacaaggauucaguucuccgaugggaacgaauuugccguggacaaaucuaagagaggacucauccauguaccuaaagaucuuccacugaagacuaagguguuggacaugucacaaaauuacauugcugaguuacaggucagugauaugagcuuccuguccgaacuaacggugcuccggcugucucacaaccgcauccagcuucuggacuugucgguuuuuaaauucaaucaggaucucgaguaucuggaccugucacauaaccaacuccagaagauaagcugucacccgaucgugaguuuucgacauuuagaucuguccuucaaugacuuuaaagcacuucccauuugcaaggaguucgguaacuugucucagcugaauuuucuaggccucagcgccaugaaacugcagaaacuugaucuguugccuaucgcgcaccuccaccuguccuacauuuuacuggaccuccguaacuauuacaucaaggaaaaugagaccgaaucacuucaaauacugaacgcuaaaacauugcaucuagucuuccacccaacuucccuguuugccauucaggugaauaucagcguaaacacccucgggugucugcagcuuacaaauauuaagcugaacgaugacaauugccagguuuucaucaaauucuugucugagcucaccagaggacccacucuguuaaacuuuacacugaaccauaucgaaaccacguggaagugucuagugagggucuuccaauuucucuggccuaaaccaguggaguaucugaauauuuacaaccuuacuauaaucgaguccauucgggaagaggacuucaccuauucaaagacaacuuugaaagcacugaccaucgaacacauaacaaaucagguguuucucuucagccagaccgcccuguacacggucuuuagugagaugaacauuaugaugcuuacuaucucugauacacccuucauccacaugcugugcccucaugcuccauccaccuuuaaguucuugaauuuuacucaaaacguuuucacagacagcauuuuugaaaaguguucgacccucgugaaacuggagacguuaauccugcagaagaauggccuaaaagaucucuucaagguaggucugaugaccaaagacaugccgucucuugagauuuuggauguguccuggaacucacuggaaagugggcgccacaaggagaauugcacaugggucgaaagcauagugguucucaaccuguccucuaauauguuaacugacagcguguucagaugucugcccccuaggaucaagguccuugauuugcauucaaacaaaauuaagaguaucccaaaacaggugcucaagcuggaggcacuacaggaacugaauguagccuuuaacucccucaccgaccugcccggaugcggcagcuucucuucacuuaguguuuugaucauugaucacaauagcgugucccauccuucugcugacuuuuuccaaucgugucagaaaaugcggagcauaaaggccggcgauaacccauuucagugcacaugcgagcugcgcgaguucgucaagaacaucgaccagguguccucagaagucuuagagggguggcccgacaguuacaaaugugauuauccggaaucuuaccgaggaagcccucucaaggacuuucacauguccgagcugucaugcaauauuacucuucugaucgugaccauuggugcgacaauguugguucucgcagugaccguaacuagccuguguaucuaucuagaucugcccugguaccucagaauggucugccaauggacgcagacaaggcggcgugcccgcaacauaccacuggaggaacuucagagaaauuugcaguuccacgcuuuuaucucuuauuccgagcaugacagugccugggugaaaagcgaacugguuccuuacuuagagaaggaagauauucaaaucugucuccacgagaggaacuucgugcccggcaaaucuauugucgagaauaucauaaacugcauugaaaaguccuauaagucaaucuuugugcugaguccaaauuucguacagagcgaguggugucauuacgaacuuuacuuugcacaccacaaccuguuccaugaggggucgaauaaccuaauucucauccuguuggaacccauaccucagaauaguaucccaaacaaauaucacaagcugaaggcuuuaaugacccagcggacuuaccuccaauggccgaaggagaaaucuaagcgaggacuguucugggccaauauucgcgcggccuuuaacaugaaacuuacccuggugacagagaauaacgacguuaagagcuga

SEQ ID NO: 9702 - RNA, 2391 nt, Artificial Sequence
  derived and/or modified sequence opt4 from TLR6__Homo_sapiens__ABY67116
augaccaaggacaaggagcccaucgugaagagcuuccacuucgugugccugaugaucaucaucgugggcaccagaauccaguucagcgacggcaacgaguucgccguggacaagagcaagagaggccugauccacgugcccaaggaccugccccugaagaccaaggugcuggacaugagccagaacuacaucgccgagcugcaggugagcgacaugagcuuccugagcgagcugaccgugcugagacugagccacaacagaauccagcugcuggaccugagcguguucaaguucaaccaggaccuggaguaccuggaccugagccacaaccagcugcagaagaucagcugccaccccaucgugagcuucagacaccuggaccugagcuucaacgacuucaaggcccugcccaucugcaaggaguucggcaaccugagccagcugaacuuccugggccugagcgccaugaagcugcagaagcuggaccugcugcccaucgcccaccugcaccugagcuacauccugcuggaccugagaaacuacuacaucaaggagaacgagaccgagagccugcagauccugaacgccaagacccugcaccugguguuccaccccaccagccuguucgccauccaggugaacaucagcgugaacacccugggcugccugcagcugaccaacaucaagcugaacgacgacaacugccagguguucaucaaguuccugagcgagcugaccagaggccccacccugcugaacuucacccugaaccacaucgagaccaccuggaagugccuggugagaguguuccaguuccuguggcccaagcccguggaguaccugaacaucuacaaccugaccaucaucgagagcaucagagaggaggacuucaccuacagcaagaccacccugaaggcccugaccaucgagcacaucaccaaccagguguuccuguucagccagaccgcccuguacaccguguucagcgagaugaacaucaugaugcugaccaucagcgacacccccuucauccacaugcugugcccccacgcccccagcaccuucaaguuccugaacuucacccagaacguguucaccgacagcaucuucgagaagugcagcacccuggugaagcuggagacccugauccugcagaagaacggccugaaggaccuguucaaggugggccugaugaccaaggacaugcccagccuggagauccuggacgugagcuggaacagccuggagagcggcagacacaaggagaacugcaccuggguggagagcaucguggugcugaaccugagcagcaacaugcugaccgacagcguguucagaugccugccccccagaaucaaggugcuggaccugcacagcaacaagaucaagagcauccccaagcaggugcugaagcuggaggcccugcaggagcugaacguggccuucaacagccugaccgaccugcccggcugcggcagcuucagcagccugagcgugcugaucaucgaccacaacagcgugagccaccccagcgccgacuucuuccagagcugccagaagaugagaagcaucaaggccggcgacaaccccuuccagugcaccugcgagcugagagaguucgugaagaacaucgaccaggugagcagcgaggugcuggagggcuggcccgacagcuacaagugcgacuaccccgagagcuacagaggcagcccccugaaggacuuccacaugagcgagcugagcugcaacaucacccugcugaucgugaccaucggcgccaccaugcuggugcuggccgugaccgugaccagccugugcaucuaccuggaccugcccugguaccugagaauggugugccaguggacccagaccagaagaagagccagaaacaucccccuggaggagcugcagagaaaccugcaguuccacgccuucaucagcuacagcgagcacgacagcgccugggugaagagcgagcuggugcccuaccuggagaaggaggacauccagaucugccugcacgagagaaacuucgugcccggcaagagcaucguggagaacaucaucaacugcaucgagaagagcuacaagagcaucuucgugcugagccccaacuucgugcagagcgaguggugccacuacgagcuguacuucgcccaccacaaccuguuccacgagggcagcaacaaccugauccugauccugcuggagcccaucccccagaacagcauccccaacaaguaccacaagcugaaggcccugaugacccagagaaccuaccugcaguggcccaaggagaagagcaagagaggccuguucugggccaacaucagagccgccuucaacaugaagcugacccuggugaccgagaacaacgacgugaagagcuga

SEQ ID NO: 9703 - RNA, 2391 nt, Artificial Sequence
  derived and/or modified sequence opt5 from TLR6__Homo_sapiens__ABY67116
augaccaaggacaaagagcccaucgugaaguccuuccacuuugucugccugaugauuaucauuguuggcacaagaauccaguucuccgaugggaacgaauuugccguggacaaaucuaagcggggacucauucaugugccuaaagaucugccgcuuaagacgaagguccuggacaugagccaaaauuacaucgcugagcuccagguguccgauaugucuuuccugagcgaacuuaccguucugcgccucucccacaacagaauccagcugcuggaccucucuguguuuaaauucaaucaggaucuggaguaucuugaccugagccauaaccaacuccagaagauuuccugucaccccaucgucagcuuucggcaucuggaucuuucuuucaaugacuuuaaagcccugccuauuugcaaggaguucggcaaccucucccagcugaauuuucuggggcucagcgcgaugaaacugcagaagcucgaucugcuccccaucgcucaucugcaccuuucuuacauucugcucgaccugcgcaacuauuacaucaaggagaaugagacagaaucccugcaaauucucaacgccaaaacccugcaccuuguguuccacccuacaagccuguuugccauccagguuaauaucucugugaacacccucggaugucugcagcuuacaaauauuaagcugaacgaugacaauugccaggucuucaucaaauuccucuccgagcugaccagaggccccacgcugcucaacuuuacccugaaccauauugaaacaaccuggaagugucuugugcggguguuccaauuucuguggccuaaaccggucgaguaucucaauaucuacaaccugacaauuaucgagagcauccgcgaagaggacuucaccuauuccaagacgacacugaaagcucuuaccauugaacacaucacaaaucagguuuuucucuucucucagaccgcccuguacaccguguuuagcgagaugaacauuaugaugcugacaaucuccgauacgcccuucauucacaugcucugcccucaugcucccagcaccuuuaaguuccugaauuuuacacaaaacguguucaccgacucuaucuuugaaaaguguuccacacuugucaaacuggagacccucauccugcagaagaaugggcugaaagaucuuuucaaggugggacucaugacgaaagacaugccuagccuggagauucuggauguuucuuggaacagccucgaauccggcagacacaaggagaauugcacauggguggaaucuaucgucgugcugaaccuuagcuccaauaugcugaccgacagcguuuuccggugucuucccccgcgcauuaaggugcuggaucugcauucuaacaaaaucaaguccauuccuaaacagguccuuaagcucgaggcccugcaggaacugaauguggcguuuaacagccucaccgaccugcccggcugcgggucuuucuccagccuuuccguccugaucauugaucacaauucugugagccauccuuccgccgacuuuuuccaaucuugucagaaaaugagaagcaucaaggcuggagauaaccccuuucagugcacaugcgagcuccgggaguucguuaagaacaucgaccagguguccagcgaaguccuggagggcuggcccgacucuuacaaaugugauuauccugaauccuaccgcgggagcccgcugaaggacuuucacaugucugagcuuuccugcaauauuacccuccugaucgugacaauuggagccacgaugcugguucucgcugugaccgucacaagccuguguaucuaucuugaucugcccugguaccucagaauggugugccaauggacccagacacggcgcagagcccggaacauuccucuggaagaacugcagagaaaucuucaguuccacgcguuuaucucuuauagcgagcaugacuccgccugggugaaaagcgaacugguucccuaccucgagaaggaagauauccaaauuugucugcacgagcgcaacuucgucccuggcaaaucuaucguggagaauauuaucaacugcauugaaaaguccuauaagagcaucuuugugcucucccccaauuucguccagucugaguggugucauuacgaacuguacuuugcucaccacaaccuuuuccaugaggggagcaauaaccugauccucauucugcuggaaccgaucccucagaauagcauucccaacaaauaucacaaacuuaaggcccugaugacccagcggacguaccuccaauggccuaaggagaaaucuaagagaggacuguucugggcuaauauccgcgccgccuuuaacaugaaacucacccuggugacagagaauaacgacguuaagagcuga

SEQ ID NO: 9704 - protein, 796 aa, Artificial Sequence [sequence omitted]

SEQ ID NO: 9705 - RNA, 2391 nt, Artificial Sequence
  TLR6__Homo_sapiens__AAY88753
augaccaaagacaaagaaccuauuguuaaaagcuuccauuuuguuugccuuaugaucauaauaguuggaaccagaauccaguucuccgacggaaaugaauuugcaguagacaagucaaaaagaggucuuauucauguuccaaaagaccuaccgcugaaaaccaaagucuuagauaugucucagaacuacaucgcugagcuucaggucucugacaugagcuuucuaucagaguugacaguuuugagacuuucccauaacagaauccagcuacuugauuuaaguguuuucaaguucaaccaggauuuagaauauuuggauuuaucucauaaucaguugcaaaagauauccugccauccuauugugaguuucaggcauuuagaucucucauucaaugauuucaaggcccugcccaucuguaaggaauuuggcaacuuaucacaacugaauuucuugggauugagugcuaugaagcugcaaaaauuagauuugcugccaauugcucacuugcaucuaaguuauauccuucuggauuuaagaaauuauuauauaaaagaaaaugagacagaaagucuacaaauucugaaugcaaaaacccuucaccuuguuuuucacccaacuaguuuauucgcuauccaagugaacauaucaguuaauacuuuagggugcuuacaacugacuaauauuaaauugaaugaugacaacugucaaguuuucauuaaauuuuuaucagaacucaccagagguccaaccuuacugaauuuuacccucaaccacauagaaacgacuuggaaaugccuggucagagucuuucaauuucuuuggcccaaaccuguggaauaucucaauauuuacaauuuaacaauaauugaaagcauucgugaagaagauuuuacuuauucuaaaacgacauugaaagcauugacaauagaacauaucacgaaccaaguuuuucuguuuucacagacagcuuuguacaccguguuuucugagaugaacauuaugauguuaaccauuucagauacaccuuuuauacacaugcuguguccucaugcaccaagcacauucaaguuuuugaacuuuacccagaacguuuucacagauaguauuuuugaaaaauguuccacguuaguuaaauuggagacacuuaucuuacaaaagaauggauuaaaagaccuuuucaaaguaggucucaugacgaaggauaugccuucuuuggaaauacuggauguuagcuggaauucuuuggaaucugguagacauaaagaaaacugcacuugggcugagaguauagugguguuaaauuugucuucaaauaugcuuacugacucuguuuucagauguuuaccucccaggaucaagguacuugaucuucacagcaauaaaauaaagagcauuccuaaacaagucguaaaacuggaagcuuugcaagaacucaauguugcuuucaauucuuuaacugaccuuccuggauguggcagcuuuagcagccuuucuguauugaucauugaucacaauucaguuucccacccaucggcugauuucuuccagagcugccagaagaugaggucaauaaaagcaggggacaauccauuccaauguaccugugagcuaagagaauuugucaaaaauauagaccaaguaucaagugaaguguuagagggcuggccugauucuuauaagugugacuacccagaaaguuauagaggaagcccacuaaaggacuuucacaugucugaauuauccugcaacauaacucugcugaucgucaccaucggugccaccaugcugguguuggcugugacugugaccucccucugcaucuacuuggaucugcccugguaucucaggauggugugccaguggacccagacucggcgcagggccaggaacauacccuuagaagaacuccaaagaaaccuccaguuucaugcuuuuauuucauauagugaacaugauucugccugggugaaaagugaauugguaccuuaccuagaaaaagaagauauacagauuugucuucaugagagaaacuuugucccuggcaagagcauuguggaaaauaucaucaacugcauugagaagaguuacaaguccaucuuuguuuugucucccaacuuuguccagagugaguggugccauuacgaacucuauuuugcccaucacaaucucuuucaugaaggaucuaauaacuuaauccucaucuuacuggaacccauuccacagaacagcauucccaacaaguaccacaagcugaaggcucucaugaugcagcggacuuauuugcaguggcccaaggagaaaagcaaacgugggcucuuuugggcuaacauuagagccgcuuuuaauaugaaauuaacacuagucacugaaaacaaugaugugaaaucuuaa

SEQ ID NO: 9706 - RNA, 2391 nt, Artificial Sequence
  derived and/or modified sequence opt1 from TLR6__Homo_sapiens__AAY88753
augaccaaggacaaggagcccaucgucaagagcuuccacuucgugugccugaugaucaucaucgugggcacccgcauccaguucagcgacgggaacgaguucgccguggacaagagcaagcggggccucauccacgucccgaaggaccugccccugaagacgaaggugcucgacaugucccagaacuacaucgccgagcuccaggugagcgacauguccuuccugagcgagcugaccguccugcgccugucccacaaccggauccagcuccuggaccugagcguguucaaguucaaccaggaccucgaguaccuggaccugucccacaaccagcuccagaagaucagcugccaccccaucguguccuuccgccaccuggaccugagcuucaacgacuucaaggcgcuccccaucugcaaggaguucgggaaccugucccagcugaacuuccucggccugagcgccaugaagcugcagaagcucgaccugcugccgaucgcccaccuccaccuguccuacauccugcucgaccugcggaacuacuacaucaaggagaacgagaccgagagccugcagauccucaacgccaagacccugcaccuggucuuccaccccacgucccucuucgccauccaggugaacaucagcgugaacacccuggggugccugcagcucaccaacaucaagcugaacgacgacaacugccaggucuucaucaaguuccuguccgagcucacccgcggccccacgcugcugaacuucacccucaaccacaucgagaccaccuggaagugccuggugcggguguuccaguuccuguggcccaagccggucgaguaccucaacaucuacaaccugacgaucaucgagagcauccgcgaggaggacuucaccuacagcaagaccacccugaaggcgcugacgaucgagcacaucaccaaccagguguuccucuucucccagaccgcccuguacaccguguucagcgagaugaacaucaugaugcugacgaucuccgacacccccuucauccacaugcucugcccccacgcccccagcaccuucaaguuccugaacuucacccagaacgucuucacggacuccaucuucgagaagugcagcacccuggugaagcucgagacccugauccugcagaagaacggccucaaggaccuguucaagguggggcugaugaccaaggacaugccgucccucgagauccuggacgucagcuggaacucccuggagagcggccggcacaaggagaacugcacgugggccgaguccaucguggugcucaaccugagcuccaacaugcugaccgacagcgucuuccgcugccucccgccccggaucaaggugcuggaccugcacuccaacaagaucaagagcauccccaagcaggucgugaagcucgaggcgcugcaggagcugaacguggccuucaacucccucaccgaccugcccgggugcggcagcuucuccagccugagcguccucaucaucgaccacaacuccgugagccaccccuccgccgacuucuuccagagcugccagaagaugcgcuccaucaaggccggggacaaccccuuccagugcacgugcgagcugcgggaguucgugaagaacaucgaccaggucagcuccgaggugcuggagggcuggcccgacagcuacaagugcgacuacccggaguccuaccgcggcagcccccucaaggacuuccacauguccgagcugagcugcaacaucacccugcucaucgugaccaucggggccaccaugcugguccuggcggugaccgugacgucccucugcaucuaccuggaccugcccugguaccuccggauggucugccaguggacccagacccgccggcgcgcccggaacaucccccuggaggagcugcagcgcaaccuccaguuccacgccuucaucagcuacuccgagcacgacagcgccugggugaaguccgagcuggugccguaccuggagaaggaggacauccagaucugccuccacgagcggaacuucguccccggcaagagcaucguggagaacaucaucaacugcaucgagaaguccuacaagagcaucuucgugcugagccccaacuucguccaguccgaguggugccacuacgagcuguacuucgcccaccacaaccucuuccacgaggggagcaacaaccugauccugauccuccuggagcccaucccgcagaacuccauccccaacaaguaccacaagcugaaggcgcucaugaugcagcgcaccuaccugcaguggcccaaggagaaguccaagcgcggccuguucugggccaacauccgggccgccuucaacaugaagcucacccuggugacggagaacaacgacgugaaguccuga

SEQ ID NO: 9707 - RNA, 2391 nt, Artificial Sequence
  derived and/or modified sequence opt2 from TLR6__Homo_sapiens__AAY88753
augaccaaggacaaggagcccaucgucaaguccuuccacuucgucugccucaugaucaucaucgucggcacccgcauccaguucuccgacggcaacgaguucgccgucgacaaguccaagcgcggccucauccacguccccaaggaccucccccucaagaccaagguccucgacaugucccagaacuacaucgccgagcuccaggucuccgacauguccuuccucuccgagcucaccguccuccgccucucccacaaccgcauccagcuccucgaccucuccgucuucaaguucaaccaggaccucgaguaccucgaccucucccacaaccagcuccagaagaucuccugccaccccaucgucuccuuccgccaccucgaccucuccuucaacgacuucaaggcccuccccaucugcaaggaguucggcaaccucucccagcucaacuuccucggccucuccgccaugaagcuccagaagcucgaccuccuccccaucgcccaccuccaccucuccuacauccuccucgaccuccgcaacuacuacaucaaggagaacgagaccgagucccuccagauccucaacgccaagacccuccaccucgucuuccaccccaccucccucuucgccauccaggucaacaucuccgucaacacccucggcugccuccagcucaccaacaucaagcucaacgacgacaacugccaggucuucaucaaguuccucuccgagcucacccgcggccccacccuccucaacuucacccucaaccacaucgagaccaccuggaagugccucguccgcgucuuccaguuccucuggcccaagcccgucgaguaccucaacaucuacaaccucaccaucaucgaguccauccgcgaggaggacuucaccuacuccaagaccacccucaaggcccucaccaucgagcacaucaccaaccaggucuuccucuucucccagaccgcccucuacaccgucuucuccgagaugaacaucaugaugcucaccaucuccgacacccccuucauccacaugcucugcccccacgcccccuccaccuucaaguuccucaacuucacccagaacgucuucaccgacuccaucuucgagaagugcuccacccucgucaagcucgagacccucauccuccagaagaacggccucaaggaccucuucaaggucggccucaugaccaaggacaugcccucccucgagauccucgacgucuccuggaacucccucgaguccggccgccacaaggagaacugcaccugggccgaguccaucgucguccucaaccucuccuccaacaugcucaccgacuccgucuuccgcugccuccccccccgcaucaagguccucgaccuccacuccaacaagaucaaguccauccccaagcaggucgucaagcucgaggcccuccaggagcucaacgucgccuucaacucccucaccgaccuccccggcugcggcuccuucuccucccucuccguccucaucaucgaccacaacuccgucucccaccccuccgccgacuucuuccaguccugccagaagaugcgcuccaucaaggccggcgacaaccccuuccagugcaccugcgagcuccgcgaguucgucaagaacaucgaccaggucuccuccgagguccucgagggcuggcccgacuccuacaagugcgacuaccccgaguccuaccgcggcuccccccucaaggacuuccacauguccgagcucuccugcaacaucacccuccucaucgucaccaucggcgccaccaugcucguccucgccgucaccgucaccucccucugcaucuaccucgaccuccccugguaccuccgcauggucugccaguggacccagacccgccgccgcgcccgcaacaucccccucgaggagcuccagcgcaaccuccaguuccacgccuucaucuccuacuccgagcacgacuccgccugggucaaguccgagcucguccccuaccucgagaaggaggacauccagaucugccuccacgagcgcaacuucguccccggcaaguccaucgucgagaacaucaucaacugcaucgagaaguccuacaaguccaucuucguccucucccccaacuucguccaguccgaguggugccacuacgagcucuacuucgcccaccacaaccucuuccacgagggcuccaacaaccucauccucauccuccucgagcccaucccccagaacuccauccccaacaaguaccacaagcucaaggcccucaugaugcagcgcaccuaccuccaguggcccaaggagaaguccaagcgcggccucuucugggccaacauccgcgccgccuucaacaugaagcucacccucgucaccgagaacaacgacgucaaguccuga

SEQ ID NO: 9708 - RNA, 2391 nt, Artificial Sequence
  derived and/or modified sequence opt3 from TLR6__Homo_sapiens__AAY88753
augaccaaggacaaagagcccaucgucaagagcuuccacuuugugugccugaugauuauaaucguuggcacaaggauucaguucuccgaugggaacgaauuugccguggacaaaucuaagagaggacucauccauguaccuaaagaucuuccacugaagacuaagguguuggacaugucacaaaauuacauugcugaguuacaggucagugauaugagcuuccuguccgaacuaacggugcuccggcugucucacaaccgcauccagcuucuggacuugucgguuuuuaaauucaaucaggaucucgaguaucuggaccugucacauaaccaacuccagaagauaagcugucacccgaucgugaguuuucgacauuuagaucuguccuucaaugacuuuaaagcacuucccauuugcaaggaguucgguaacuugucucagcugaauuuucuaggccucagcgccaugaaacugcagaaacuugaucuguugccuaucgcgcaccuccaccuguccuacauuuuacuggaccuccguaacuauuacaucaaggagaaugagaccgaaucacuucaaauacugaacgcuaagacauugcaucuagucuuccacccaacuucccuguuugccauucaggugaauaucagcguaaacacccucgggugucugcagcuuacaaauauuaagcugaacgaugacaauugccagguuuucaucaaauucuugucugagcucaccagaggacccacucuguuaaacuuuacacugaaccauaucgaaaccacguggaagugucuagugagggucuuccaauuucucuggccuaaaccaguggaguaucugaauauuuacaaccuuacuauaaucgaguccauucgggaagaggacuucaccuauucaaagacaacuuugaaagcacugaccaucgaacacauaacaaaucagguguuucucuucagccagaccgcccuguacacggucuuuagugagaugaacauuaugaugcuuacuaucucugauacacccuucauccacaugcugugcccucaugcuccauccaccuuuaaguucuugaauuuuacucaaaacguuuucacagacagcauuuuugaaaaguguucgacccucgugaaacuggagacguuaauccugcagaagaauggccuaaaagaucucuucaagguaggucugaugaccaaagacaugccgucucuugagauuuuggauguguccuggaacucacuggaaagugggcgccacaaggagaauugcacaugggcagaaagcauagucgugcucaaccuguccucuaauauguuaacugacagcguuuucagaugucugcccccuaggaucaaggugcuugauuugcauucaaacaaaauuaagaguaucccaaaacaggucgugaagcucgaggcccugcaggaacuaaauguagcuuuuaacucccugaccgaccuccccggaugcggcagcuucucuucacugaguguucuuaucauugaucacaauagcgugucccauccuucugccgacuuuuuccaaucgugucagaaaaugcggagcauaaaggcgggcgauaacccauuucagugcacaugcgaguugcgcgaguucgucaagaacaucgaccagguguccucagaaguccuggagggguggcccgacaguuacaaaugugauuauccggaaucuuaccgaggaagcccuuuaaaggacuuucacauguccgagcucucaugcaauauuacucugcuuaucgugaccauuggugcaacaaugcugguuuuggccgugaccguaacuagccucuguaucuaucuggaucuacccugguaccugagaauggucugccaauggacgcagacaaggcggcgugcucgcaacauaccacucgaagaacugcagagaaaucuucaguuccacgccuuuaucucuuauuccgagcaugacagugcaugggugaaaagcgaauugguuccuuaccuggagaaggaagauauucaaaucuguuuacacgagaggaacuucgugcccggcaaaucuauugucgagaauaucauaaacugcauugaaaaguccuauaagucaaucuuugugcucaguccaaauuucguacagagcgaguggugucauuacgaacuguacuuugcucaccacaaccuuuuccaugaggggucgaauaaccugauucuaauccuccuggaacccauaccucagaauaguaucccaaacaaauaucacaaguugaaagcccugaugaugcagcggaccuacuuacaauggccgaaggagaaaucuaagcgaggacucuucugggcgaauauucgcgccgcauuuaacaugaaacugacucuugugaccgagaauaacgacguuaagagcuga

SEQ ID NO: 9709 - RNA, 2391 nt, Artificial Sequence
  derived and/or modified sequence opt4 from TLR6__Homo_sapiens__AAY88753
augaccaaggacaaggagcccaucgugaagagcuuccacuucgugugccugaugaucaucaucgugggcaccagaauccaguucagcgacggcaacgaguucgccguggacaagagcaagagaggccugauccacgugcccaaggaccugccccugaagaccaaggugcuggacaugagccagaacuacaucgccgagcugcaggugagcgacaugagcuuccugagcgagcugaccgugcugagacugagccacaacagaauccagcugcuggaccugagcguguucaaguucaaccaggaccuggaguaccuggaccugagccacaaccagcugcagaagaucagcugccaccccaucgugagcuucagacaccuggaccugagcuucaacgacuucaaggcccugcccaucugcaaggaguucggcaaccugagccagcugaacuuccugggccugagcgccaugaagcugcagaagcuggaccugcugcccaucgcccaccugcaccugagcuacauccugcuggaccugagaaacuacuacaucaaggagaacgagaccgagagccugcagauccugaacgccaagacccugcaccugguguuccaccccaccagccuguucgccauccaggugaacaucagcgugaacacccugggcugccugcagcugaccaacaucaagcugaacgacgacaacugccagguguucaucaaguuccugagcgagcugaccagaggccccacccugcugaacuucacccugaaccacaucgagaccaccuggaagugccuggugagaguguuccaguuccuguggcccaagcccguggaguaccugaacaucuacaaccugaccaucaucgagagcaucagagaggaggacuucaccuacagcaagaccacccugaaggcccugaccaucgagcacaucaccaaccagguguuccuguucagccagaccgcccuguacaccguguucagcgagaugaacaucaugaugcugaccaucagcgacacccccuucauccacaugcugugcccccacgcccccagcaccuucaaguuccugaacuucacccagaacguguucaccgacagcaucuucgagaagugcagcacccuggugaagcuggagacccugauccugcagaagaacggccugaaggaccuguucaaggugggccugaugaccaaggacaugcccagccuggagauccuggacgugagcuggaacagccuggagagcggcagacacaaggagaacugcaccugggccgagagcaucguggugcugaaccugagcagcaacaugcugaccgacagcguguucagaugccugccccccagaaucaaggugcuggaccugcacagcaacaagaucaagagcauccccaagcagguggugaagcuggaggcccugcaggagcugaacguggccuucaacagccugaccgaccugcccggcugcggcagcuucagcagccugagcgugcugaucaucgaccacaacagcgugagccaccccagcgccgacuucuuccagagcugccagaagaugagaagcaucaaggccggcgacaaccccuuccagugcaccugcgagcugagagaguucgugaagaacaucgaccaggugagcagcgaggugcuggagggcuggcccgacagcuacaagugcgacuaccccgagagcuacagaggcagcccccugaaggacuuccacaugagcgagcugagcugcaacaucacccugcugaucgugaccaucggcgccaccaugcuggugcuggccgugaccgugaccagccugugcaucuaccuggaccugcccugguaccugagaauggugugccaguggacccagaccagaagaagagccagaaacaucccccuggaggagcugcagagaaaccugcaguuccacgccuucaucagcuacagcgagcacgacagcgccugggugaagagcgagcuggugcccuaccuggagaaggaggacauccagaucugccugcacgagagaaacuucgugcccggcaagagcaucguggagaacaucaucaacugcaucgagaagagcuacaagagcaucuucgugcugagccccaacuucgugcagagcgaguggugccacuacgagcuguacuucgcccaccacaaccuguuccacgagggcagcaacaaccugauccugauccugcuggagcccaucccccagaacagcauccccaacaaguaccacaagcugaaggcccugaugaugcagagaaccuaccugcaguggcccaaggagaagagcaagagaggccuguucugggccaacaucagagccgccuucaacaugaagcugacccuggugaccgagaacaacgacgugaagagcuga

SEQ ID NO: 9710 - RNA, 2391 nt, Artificial Sequence
  derived and/or modified sequence opt5 from TLR6__Homo_sapiens__AAY88753
augaccaaggacaaagagcccaucgugaaguccuuccacuuugucugccugaugauuaucauuguuggcacaagaauccaguucuccgaugggaacgaauuugccguggacaaaucuaagcggggacucauucaugugccuaaagaucugccgcuuaagacgaagguccuggacaugagccaaaauuacaucgcugagcuccagguguccgauaugucuuuccugagcgaacuuaccguucugcgccucucccacaacagaauccagcugcuggaccucucuguguuuaaauucaaucaggaucuggaguaucuugaccugagccauaaccaacuccagaagauuuccugucaccccaucgucagcuuucggcaucuggaucuuucuuucaaugacuuuaaagcccugccuauuugcaaggaguucggcaaccucucccagcugaauuuucuggggcucagcgcgaugaaacugcagaagcucgaucugcuccccaucgcucaucugcaccuuucuuacauucugcucgaccugcgcaacuauuacaucaaggagaaugagacagaaucccugcaaauucucaacgccaaaacccugcaccuuguguuccacccuacaagccuguuugccauccagguuaauaucucugugaacacccucggaugucugcagcuuacaaauauuaagcugaacgaugacaauugccaggucuucaucaaauuccucuccgagcugaccagaggccccacgcugcucaacuuuacccugaaccauauugaaacaaccuggaagugucuugugcggguguuccaauuucuguggccuaaaccggucgaguaucucaauaucuacaaccugacaauuaucgagagcauccgcgaagaggacuucaccuauuccaagacgacacugaaagcucuuaccauugaacacaucacaaaucagguuuuucucuucucucagaccgcccuguacaccguguuuagcgagaugaacauuaugaugcugacaaucuccgauacgcccuucauucacaugcucugcccucaugcucccagcaccuuuaaguuccugaauuuuacacaaaacguguucaccgacucuaucuuugaaaaguguuccacacuugucaaacuggagacccucauccugcagaagaaugggcugaaagaucuuuucaaggugggacucaugacgaaagacaugccuagccuggagauucuggauguuucuuggaacagccucgaauccggcagacacaaggagaauugcacaugggccgaaucuaucgugguccugaaccuuagcuccaauaugcugaccgacagcguguuccggugucuucccccgcgcauuaagguucuggaucugcauucuaacaaaaucaaguccauuccuaaacagguggucaaacuugaggcgcuccaggaacugaauguggccuuuaacagccugaccgaccuccccggcugcgggucuuucuccagccuguccguccuuaucauugaucacaauucugugagccauccuuccgcugacuuuuuccaaucuugucagaagaugagaagcaucaaggccggagauaaccccuuucagugcacaugcgagcugcgggaguucguuaagaacaucgaccagguguccagcgaaguccucgagggcuggcccgacucuuacaaaugugauuauccugaauccuaccgcgggagcccgcugaaggacuuucacaugucugagcuguccugcaauauuacccuucucaucgugacaauuggagcuacgaugcugguucuggccgugaccgucacaagccucuguaucuaucuggaucuucccugguaccugagaauggugugccaauggacccagacacggcgcagagcgcggaacauuccucucgaagaacugcagagaaaucugcaguuccacgccuuuaucucuuauagcgagcaugacuccgcuugggugaaaagcgaacuuguucccuaccuggagaaggaagauauccaaauuugucuccacgagcgcaacuucgucccuggcaaaucuaucguggagaauauuaucaacugcauugaaaaguccuauaagagcaucuuugugcugucccccaauuucguccagucugaguggugucauuacgaacucuacuuugcccaccacaaccuguuccaugaggggagcaauaaccuuauccugauucuccuggaaccgaucccucagaauagcauucccaacaaauaucacaagcugaaagcucuuaugaugcagcggaccuaccugcaauggccuaaggagaaaucuaagagaggacucuucugggccaauauccgcgccgcuuuuaacaugaaacugacgcucgugaccgagaauaacgacguuaagagcuga

SEQ ID NO: 9711 - protein, 796 aa, Artificial Sequence [sequence omitted]

SEQ ID NO: 9712 - RNA, 2391 nt, Artificial Sequence
  TLR6__Homo_sapiens__AAY88754
augaccaaagacaaagaaccuauuguuaaaagcuuccauuuuguuugccuuaugaucauaauaguuggaaccagaauccaguucuccgacggaaaugaauuugcaguagacaagucaaaaagaggucuuauucauguuccaaaagaccuaccgcugaaaaccaaagucuuagauaugucucagaacuacaucgcugagcuucaggucucugacaugagcuuucuaucagaguugacaguuuugagacuuucccauaacagaauccagcuacuugauuuaaguguuuucaaguucaaccaggauuuagaauauuuggauuuaucucauaaucaguugcaaaagauauccugccauccuauugugaguuucaggcauuuagaucucucauucaaugauuucaaggcccugcccaucuguaaggaauuuggcaacuuaucacaacugaauuucuugggauugagugcuaugaagcugcaaaaauuagauuugcugccaauugcucacuugcaucuaaguuauauccuucuggauuuaagaaauuauuauauaaaagaaaaugagacagaaagucuacaaauucugaaugcaaaaacccuucaccuuguuuuucacccaacuaguuuauucgcuauccaagugaacauaucaguuaauacuuuagggugcuuacaacugacuaauauuaaauugaaugaugacaacugucaaguuuucauuaaauuuuuaucagaacucaccagagguccaaccuuacugaauuuuacccucaaccacauagaaacgacuuggaaaugccuggucagagucuuucaauuucuuuggcccaaaccuguggaauaucucaauauuuacaauuuaacaauaauugaaagcauucgugaagaagauuuuacuuauucuaaaacgacauugaaagcauugacaauagaacauaucacgaaccaaguuuuucuguuuucacagacagcuuuguacaccguguuuucugagaugaacauuaugauguuaaccauuucagauacaccuuuuauacacaugcuguguccucaugcaccaagcacauucaaguuuuugaacuuuacccagaacguuuucacagauaguauuuuugaaaaauguuccacguuaguuaaauuggagacacuuaucuuacaaaagaauggauuaaaagaccuuuucaaaguaggucucaugacgaaggauaugccuucuuuggaaauacuggauguuagcuggaauucuuuggaaucugguagacauaaagaaaacugcacuuggguugagaguauagugguguuaaauuugucuucaaauaugcuuacugacucuguuuucagauguuuaccucccaggaucaagguacuugaucuucacagcaauaaaauaaagagcauuccuaaacaagucguaaaacuggaagcuuugcaagaacucaauguugcuuucaauucuuuaacugaccuuccuggauguggcagcuuuagcagccuuucuguauugaucauugaucacaauucaguuucccacccaucggcugauuucuuccagagcugccagaagaugaggucaauaaaagcaggggacaauccauuccaauguaccugugagcuaagagaauuugucaaaaauauagaccaaguaucaagugaaguguuagagggcuggccugauucuuauaagugugacuacccagaaaguuauagaggaagcccacuaaaggacuuucacaugucugaauuauccugcaacauaacucugcugaucgucaccaucggugccaccaugcugguguuggcugugacugugaccucccucugcaucuacuuggaucugcccugguaucucaggauggugugccaguggacccagacucggcgcagggccaggaacauacccuuagaagaacuccaaagaaaccuccaguuucaugcuuuuauuucauauagugaacaugauucugccugggugaaaagugaauugguaccuuaccuagaaaaagaagauauacagauuugucuucaugagagaaacuuugucccuggcaagagcauuguggaaaauaucaucaacugcauugagaagaguuacaaguccaucuuuguuuugucucccaacuuuguccagagugaguggugccauuacgaacucuauuuugcccaucacaaucucuuucaugaaggaucuaauaacuuaauccucaucuuacuggaacccauuccacagaacagcauucccaacaaguaccacaagcugaaggcucucaugacgcagcggacuuauuugcaguggcccaaggagaaaagcaaacgugggcucuuuugggcuaacauuagagccgcuuuuaauaugaaauuaacacuagucacugaaaacaaugaugugaaaucuuaa

SEQ ID NO: 9713 - RNA, 2391 nt, Artificial Sequence
  derived and/or modified sequence opt1 from TLR6__Homo_sapiens__AAY88754
augaccaaggacaaggagcccaucgucaagagcuuccacuucgugugccugaugaucaucaucgugggcacccgcauccaguucuccgacgggaacgaguucgccguggacaagagcaagcggggccucauccacgucccgaaggaccugccccugaagacgaaggugcucgacaugucccagaacuacaucgccgagcuccaggugagcgacauguccuuccugagcgagcugaccguccugcgccugucccacaaccggauccagcuccuggaccugagcguguucaaguucaaccaggaccucgaguaccuggaccugucccacaaccagcuccagaagaucagcugccaccccaucguguccuuccgccaccuggaccugagcuucaacgacuucaaggcgcuccccaucugcaaggaguucgggaaccugucccagcugaacuuccucggccugagcgccaugaagcugcagaagcucgaccugcugccgaucgcccaccuccaccuguccuacauccugcucgaccugcggaacuacuacaucaaggagaacgagaccgagagccugcagauccucaacgccaagacccugcaccuggucuuccaccccacgucccucuucgccauccaggugaacaucagcgugaacacccuggggugccugcagcucaccaacaucaagcugaacgacgacaacugccaggucuucaucaaguuccuguccgagcucacccgcggccccacgcugcugaacuucacccucaaccacaucgagaccaccuggaagugccuggugcggguguuccaguuccuguggcccaagccggucgaguaccucaacaucuacaaccugacgaucaucgagagcauccgcgaggaggacuucaccuacagcaagaccacccugaaggcgcugacgaucgagcacaucaccaaccagguguuccucuucucccagaccgcccuguacaccguguucagcgagaugaacaucaugaugcugacgaucuccgacacccccuucauccacaugcucugcccccacgcccccagcaccuucaaguuccugaacuucacccagaacgucuucacggacuccaucuucgagaagugcagcacccuggugaagcucgagacccugauccugcagaagaacggccucaaggaccuguucaagguggggcugaugaccaaggacaugccgucccucgagauccuggacgucagcuggaacucccuggagagcggccggcacaaggagaacugcacguggguggaguccaucgugguccucaaccugagcuccaacaugcugaccgacagcguguuccgcugccucccgccccggaucaagguccuggaccugcacuccaacaagaucaagagcauccccaagcaggucgugaagcucgaggcccugcaggagcugaacguggcguucaacucccucaccgaccugcccgggugcggcagcuucuccagccugagcgugcucaucaucgaccacaacuccgugagccaccccuccgccgacuucuuccagagcugccagaagaugcgcuccaucaaggccggggacaaccccuuccagugcacgugcgagcugcgggaguucgucaagaacaucgaccaggugagcuccgaggugcuggagggcuggcccgacagcuacaagugcgacuacccggaguccuaccgcggcagcccccucaaggacuuccacauguccgagcugagcugcaacaucacccugcucaucgucaccaucggggccaccaugcuggugcuggccgugaccgucacgucccucugcaucuaccuggaccugcccugguaccuccggauggugugccaguggacccagacccgccggcgcgcgcggaacaucccccuggaggagcugcagcgcaaccuccaguuccacgccuucaucagcuacuccgagcacgacagcgccugggugaaguccgagcuggucccguaccuggagaaggaggacauccagaucugccuccacgagcggaacuucgugcccggcaagagcaucguggagaacaucaucaacugcaucgagaaguccuacaagagcaucuucguccugagccccaacuucgugcaguccgaguggugccacuacgagcuguacuucgcccaccacaaccucuuccacgaggggagcaacaaccugauccugauccuccuggagcccaucccgcagaacuccauccccaacaaguaccacaagcugaaggcccucaugacccagcgcaccuaccugcaguggcccaaggagaaguccaagcgcggccuguucugggcgaacauccgggccgccuucaacaugaagcucacgcuggugaccgagaacaacgacgucaagagcuga

SEQ ID NO: 9714 - RNA, 2391 nt, Artificial Sequence
  derived and/or modified sequence opt2 from TLR6__Homo_sapiens__AAY88754
augaccaaggacaaggagcccaucgucaaguccuuccacuucgucugccucaugaucaucaucgucggcacccgcauccaguucuccgacggcaacgaguucgccgucgacaaguccaagcgcggccucauccacguccccaaggaccucccccucaagaccaagguccucgacaugucccagaacuacaucgccgagcuccaggucuccgacauguccuuccucuccgagcucaccguccuccgccucucccacaaccgcauccagcuccucgaccucuccgucuucaaguucaaccaggaccucgaguaccucgaccucucccacaaccagcuccagaagaucuccugccaccccaucgucuccuuccgccaccucgaccucuccuucaacgacuucaaggcccuccccaucugcaaggaguucggcaaccucucccagcucaacuuccucggccucuccgccaugaagcuccagaagcucgaccuccuccccaucgcccaccuccaccucuccuacauccuccucgaccuccgcaacuacuacaucaaggagaacgagaccgagucccuccagauccucaacgccaagacccuccaccucgucuuccaccccaccucccucuucgccauccaggucaacaucuccgucaacacccucggcugccuccagcucaccaacaucaagcucaacgacgacaacugccaggucuucaucaaguuccucuccgagcucacccgcggccccacccuccucaacuucacccucaaccacaucgagaccaccuggaagugccucguccgcgucuuccaguuccucuggcccaagcccgucgaguaccucaacaucuacaaccucaccaucaucgaguccauccgcgaggaggacuucaccuacuccaagaccacccucaaggcccucaccaucgagcacaucaccaaccaggucuuccucuucucccagaccgcccucuacaccgucuucuccgagaugaacaucaugaugcucaccaucuccgacacccccuucauccacaugcucugcccccacgcccccuccaccuucaaguuccucaacuucacccagaacgucuucaccgacuccaucuucgagaagugcuccacccucgucaagcucgagacccucauccuccagaagaacggccucaaggaccucuucaaggucggccucaugaccaaggacaugcccucccucgagauccucgacgucuccuggaacucccucgaguccggccgccacaaggagaacugcaccugggucgaguccaucgucguccucaaccucuccuccaacaugcucaccgacuccgucuuccgcugccuccccccccgcaucaagguccucgaccuccacuccaacaagaucaaguccauccccaagcaggucgucaagcucgaggcccuccaggagcucaacgucgccuucaacucccucaccgaccuccccggcugcggcuccuucuccucccucuccguccucaucaucgaccacaacuccgucucccaccccuccgccgacuucuuccaguccugccagaagaugcgcuccaucaaggccggcgacaaccccuuccagugcaccugcgagcuccgcgaguucgucaagaacaucgaccaggucuccuccgagguccucgagggcuggcccgacuccuacaagugcgacuaccccgaguccuaccgcggcuccccccucaaggacuuccacauguccgagcucuccugcaacaucacccuccucaucgucaccaucggcgccaccaugcucguccucgccgucaccgucaccucccucugcaucuaccucgaccuccccugguaccuccgcauggucugccaguggacccagacccgccgccgcgcccgcaacaucccccucgaggagcuccagcgcaaccuccaguuccacgccuucaucuccuacuccgagcacgacuccgccugggucaaguccgagcucguccccuaccucgagaaggaggacauccagaucugccuccacgagcgcaacuucguccccggcaaguccaucgucgagaacaucaucaacugcaucgagaaguccuacaaguccaucuucguccucucccccaacuucguccaguccgaguggugccacuacgagcucuacuucgcccaccacaaccucuuccacgagggcuccaacaaccucauccucauccuccucgagcccaucccccagaacuccauccccaacaaguaccacaagcucaaggcccucaugacccagcgcaccuaccuccaguggcccaaggagaaguccaagcgcggccucuucugggccaacauccgcgccgccuucaacaugaagcucacccucgucaccgagaacaacgacgucaaguccuga

SEQ ID NO: 9715 - RNA, 2391 nt, Artificial Sequence
  derived and/or modified sequence opt3 from TLR6__Homo_sapiens__AAY88754
augaccaaggacaaagagcccaucgucaagagcuuccacuuugugugccugaugauuauaaucguuggcacaaggauucaguucuccgaugggaacgaauuugccguggacaaaucuaagagaggacucauccauguaccuaaagaucuuccacugaagacuaagguguuggacaugucacaaaauuacauugcugaguuacaggucagugauaugagcuuccuguccgaacuaacggugcuccggcugucucacaaccgcauccagcuucuggacuugucgguuuuuaaauucaaucaggaucucgaguaucuggaccugucacauaaccaacuccagaagauaagcugucacccgaucgugaguuuucgacauuuagaucuguccuucaaugacuuuaaagcacuucccauuugcaaggaguucgguaacuugucucagcugaauuuucuaggccucagcgccaugaaacugcagaaacuugaucuguugccuaucgcgcaccuccaccuguccuacauuuuacuggaccuccguaacuauuacaucaaggagaaugagaccgaaucacuucaaauacugaacgcuaagacauugcaucuagucuuccacccaacuucccuguuugccauucaggugaauaucagcguaaacacccucgggugucugcagcuuacaaauauuaagcugaacgaugacaauugccagguuuucaucaaauucuugucugagcucaccagaggacccacucuguuaaacuuuacacugaaccauaucgaaaccacguggaagugucuagugagggucuuccaauuucucuggccuaaaccaguggaguaucugaauauuuacaaccuuacuauaaucgaguccauucgggaagaggacuucaccuauucaaagacaacuuugaaagcacugaccaucgaacacauaacaaaucagguguuucucuucagccagaccgcccuguacacggucuuuagugagaugaacauuaugaugcuuacuaucucugauacacccuucauccacaugcugugcccucaugcuccauccaccuuuaaguucuugaauuuuacucaaaacguuuucacagacagcauuuuugaaaaguguucgacccucgugaaacuggagacguuaauccugcagaagaauggccuaaaagaucucuucaagguaggucugaugaccaaagacaugccgucucuugagauuuuggauguguccuggaacucacuggaaagugggcgccacaaggagaauugcacaugggucgaaagcauagugguucucaaccuguccucuaauauguuaacugacagcguguucagaugucugcccccuaggaucaagguccuugauuugcauucaaacaaaauuaagaguaucccaaaacaggugguaaagcucgaggcacugcaggaacuaaauguugccuuuaacucccugaccgaccuccccggaugcggcagcuucucuucacugagugugcuuaucauugaucacaauagcgucucccauccuucugcugacuuuuuccaaucgugucagaaaaugcggagcauaaaggccggcgauaacccauuucagugcacaugcgaguugcgcgaguucgugaagaacaucgaccaggucuccucagaagugcuggagggguggcccgacaguuacaaaugugauuauccggaaucuuaccgaggaagcccuuuaaaggacuuucacauguccgagcucucaugcaauauuacucugcuuaucguuaccauuggugcgacaaugcugguguuggcaguaaccgucacuagccucuguaucuaucuggaucuacccugguaccugagaauggugugccaauggacgcagacaaggcggcgugcccgcaacauaccacucgaagaacugcagagaaaucuucaguuccacgcuuuuaucucuuauuccgagcaugacagugccuggguuaaaagcgaauuggugccuuaccuggagaaggaagauauucaaaucuguuuacacgagaggaacuucguccccggcaaaucuauuguggagaauaucauaaacugcauugaaaaguccuauaagucaaucuuuguacucaguccaaauuucgugcagagcgaguggugucauuacgaacuguacuuugcacaccacaaccuuuuccaugaggggucgaauaaccugauucuaauccuccuggaacccauaccucagaauaguaucccaaacaaauaucacaaguugaaagcucugaugacccagcggacuuacuuacaauggccgaaggagaaaucuaagcgaggacucuucugggccaauauucgcgcggccuuuaacaugaaacugacccuuguuacagagaauaacgacgucaagagcuga

SEQ ID NO: 9716 - RNA, 2391 nt, Artificial Sequence
  derived and/or modified sequence opt4 from TLR6__Homo_sapiens__AAY88754
augaccaaggacaaggagcccaucgugaagagcuuccacuucgugugccugaugaucaucaucgugggcaccagaauccaguucagcgacggcaacgaguucgccguggacaagagcaagagaggccugauccacgugcccaaggaccugccccugaagaccaaggugcuggacaugagccagaacuacaucgccgagcugcaggugagcgacaugagcuuccugagcgagcugaccgugcugagacugagccacaacagaauccagcugcuggaccugagcguguucaaguucaaccaggaccuggaguaccuggaccugagccacaaccagcugcagaagaucagcugccaccccaucgugagcuucagacaccuggaccugagcuucaacgacuucaaggcccugcccaucugcaaggaguucggcaaccugagccagcugaacuuccugggccugagcgccaugaagcugcagaagcuggaccugcugcccaucgcccaccugcaccugagcuacauccugcuggaccugagaaacuacuacaucaaggagaacgagaccgagagccugcagauccugaacgccaagacccugcaccugguguuccaccccaccagccuguucgccauccaggugaacaucagcgugaacacccugggcugccugcagcugaccaacaucaagcugaacgacgacaacugccagguguucaucaaguuccugagcgagcugaccagaggccccacccugcugaacuucacccugaaccacaucgagaccaccuggaagugccuggugagaguguuccaguuccuguggcccaagcccguggaguaccugaacaucuacaaccugaccaucaucgagagcaucagagaggaggacuucaccuacagcaagaccacccugaaggcccugaccaucgagcacaucaccaaccagguguuccuguucagccagaccgcccuguacaccguguucagcgagaugaacaucaugaugcugaccaucagcgacacccccuucauccacaugcugugcccccacgcccccagcaccuucaaguuccugaacuucacccagaacguguucaccgacagcaucuucgagaagugcagcacccuggugaagcuggagacccugauccugcagaagaacggccugaaggaccuguucaaggugggccugaugaccaaggacaugcccagccuggagauccuggacgugagcuggaacagccuggagagcggcagacacaaggagaacugcaccuggguggagagcaucguggugcugaaccugagcagcaacaugcugaccgacagcguguucagaugccugccccccagaaucaaggugcuggaccugcacagcaacaagaucaagagcauccccaagcagguggugaagcuggaggcccugcaggagcugaacguggccuucaacagccugaccgaccugcccggcugcggcagcuucagcagccugagcgugcugaucaucgaccacaacagcgugagccaccccagcgccgacuucuuccagagcugccagaagaugagaagcaucaaggccggcgacaaccccuuccagugcaccugcgagcugagagaguucgugaagaacaucgaccaggugagcagcgaggugcuggagggcuggcccgacagcuacaagugcgacuaccccgagagcuacagaggcagcccccugaaggacuuccacaugagcgagcugagcugcaacaucacccugcugaucgugaccaucggcgccaccaugcuggugcuggccgugaccgugaccagccugugcaucuaccuggaccugcccugguaccugagaauggugugccaguggacccagaccagaagaagagccagaaacaucccccuggaggagcugcagagaaaccugcaguuccacgccuucaucagcuacagcgagcacgacagcgccugggugaagagcgagcuggugcccuaccuggagaaggaggacauccagaucugccugcacgagagaaacuucgugcccggcaagagcaucguggagaacaucaucaacugcaucgagaagagcuacaagagcaucuucgugcugagccccaacuucgugcagagcgaguggugccacuacgagcuguacuucgcccaccacaaccuguuccacgagggcagcaacaaccugauccugauccugcuggagcccaucccccagaacagcauccccaacaaguaccacaagcugaaggcccugaugacccagagaaccuaccugcaguggcccaaggagaagagcaagagaggccuguucugggccaacaucagagccgccuucaacaugaagcugacccuggugaccgagaacaacgacgugaagagcuga

SEQ ID NO: 9717 - RNA, 2391 nt, Artificial Sequence
  derived and/or modified sequence opt5 from TLR6__Homo_sapiens__AAY88754
augaccaaggacaaagagcccaucgugaaguccuuccacuuugugugccugaugauuaucauuguuggcacaagaauccaguucuccgaugggaacgaauuugccguggacaaaucuaagcggggacucauucaugugccuaaagaucugccgcuuaagacgaagguccuggacaugagccaaaauuacaucgcugagcuccagguguccgauaugucuuuccugagcgaacuuaccguucugcgccucucccacaacagaauccagcugcuggaccucucuguguuuaaauucaaucaggaucuggaguaucuugaccugagccauaaccaacuccagaagauuuccugucaccccaucgucagcuuucggcaucuggaucuuucuuucaaugacuuuaaagcccugccuauuugcaaggaguucggcaaccucucccagcugaauuuucuggggcucagcgcgaugaaacugcagaagcucgaucugcuccccaucgcucaucugcaccuuucuuacauucugcucgaccugcgcaacuauuacaucaaggagaaugagacagaaucccugcaaauucucaacgccaaaacccugcaccuuguguuccacccuacaagccuguuugccauccagguuaauaucucugugaacacccucggaugucugcagcuuacaaauauuaagcugaacgaugacaauugccaggucuucaucaaauuccucuccgagcugaccagaggccccacgcugcucaacuuuacccugaaccauauugaaacaaccuggaagugucuugugcggguguuccaauuucuguggccuaaaccggucgaguaucucaauaucuacaaccugacaauuaucgagagcauccgcgaagaggacuucaccuauuccaagacgacacugaaagcucuuaccauugaacacaucacaaaucagguuuuucucuucucucagaccgcccuguacaccguguuuagcgagaugaacauuaugaugcugacaaucuccgauacgcccuucauucacaugcucugcccucaugcucccagcaccuuuaaguuccugaauuuuacacaaaacguguucaccgacucuaucuuugaaaaguguuccacacuugucaaacuggagacccucauccugcagaagaaugggcugaaagaucuuuucaaggugggacucaugacgaaagacaugccuagccuggagauucuggauguuucuuggaacagccucgaauccggcagacacaaggagaauugcacauggguggaaucuaucgucgugcugaaccuuagcuccaauaugcugaccgacagcguuuuccggugucuucccccgcgcauuaaggugcuggaucugcauucuaacaaaaucaaguccauuccuaaacaggucgugaaacuugaggcccuccaggaacugaaugucgcguuuaacagccugaccgaccuccccggcugcgggucuuucuccagccuguccgugcuuaucauugaucacaauucuguuagccauccuuccgccgacuuuuuccaaucuugucagaagaugagaagcaucaaggcuggagauaaccccuuucagugcacaugcgagcugcgggaguucgugaagaacaucgaccaggucuccagcgaagugcucgagggcuggcccgacucuuacaaaugugauuauccugaauccuaccgcgggagcccgcugaaggacuuucacaugucugagcuguccugcaauauuacccuucucaucguuacaauuggagccacgaugcuggugcuggcugucaccgugacaagccucuguaucuaucuggaucuucccugguaccugagaauggugugccaauggacccagacacggcgcagagcccggaacauuccucucgaagaacugcagagaaaucugcaguuccacgcguuuaucucuuauagcgagcaugacuccgccuggguuaaaagcgaacuuguccccuaccuggagaaggaagauauccaaauuugucuccacgagcgcaacuucgugccuggcaaaucuaucguggagaauauuaucaacugcauugaaaaguccuauaagagcaucuuuguccugucccccaauuucgugcagucugaguggugucauuacgaacucuacuuugcucaccacaaccuguuccaugaggggagcaauaaccuuauccugauucuccuggaaccgaucccucagaauagcauucccaacaaauaucacaagcugaaagcccuuaugacccagcggacguaccugcaauggccuaaggagaaaucuaagagaggacucuucugggcuaauauccgcgccgccuuuaacaugaaacugacccucguuacagagaauaacgacgucaagagcuga

SEQ ID NO: 9718 - protein, 796 aa, Artificial Sequence [sequence omitted]

SEQ ID NO: 9719 - RNA, 2391 nt, Artificial Sequence
  TLR6__Homo_sapiens__AAY88755
augaccaaagacaaagaaccuauuguuaaaagcuuccauuuuguuugccuuaugaucauaauaguuggaaccagaauccaguucuccgacggaaaugaauuugcaguagacaagucaaaaagaggucuuauucauguuccaaaagaccuaccgcugaaaaccaaagucuuagauaugucucagaacuacaucgcugagcuucaggucucugacaugagcuuucuaucagaguugacaguuuugagacuuucccauaacagaauccagcuacuugauuuaaguguuuucaaguucaaccaggauuuagaauauuuggauuuaucucauaaucaguugcaaaagauauccugccauccuauugugaguuucaggcauuuagaucucucauucaaugauuucaaggcccugcccaucuguaaggaauuuggcaacuuaucacaacugaauuucuugggauugagugcuaugaagcugcaaaaauuagauuugcugccaauugcucacuugcaucuaaguuauauccuucuggauuuaagaaauuauuauauaaaagaaaaugagacagaaagucuacaaauucugaaugcaaaaacccuucaccuuguuuuucacccaacuaguuuauucgcuauccaagugaacauaucaguuaauacuuuagggugcuuacaacugacuaauauuaaauugaaugaugacaacugucaaguuuucauuaaauuuuuaucagaacucaccagagguccaaccuuacugaauuuuacccucaaccacauagaaacgacuuggaaaugccuggucagagucuuucaauuucuuuggcccaaaccuguggaauaucucaauauuuacaauuuaacaauaauugaaagcauucgugaagaagauuuuacuuauucuaaaacgacauugaaagcauugacaauagaacauaucacgaaccaaguuuuucuguuuucacagacagcuuuguacaccguguuuucugagaugaacauuaugauguuaaccauuucagauacaccuuuuauacacaugcuguguccucaugcaccaagcacauucaaguuuuugaacuuuacccagaacguuuucacagauaguauuuuugaaaaauguuccacguuaguuaaauuggagacacuuaucuuacaaaagaauggauuaaaagaccuuuucaaaguaggucucaugacgaaggauaugccuucuuuggaaauacuggauguuagcuggaauucuuuggaaucugguagacauaaagaaaacugcacuuggguugagaguauagugguguuaaauuugucuucaaauaugcuuacugacucuguuuucagauguuuaccucccaggaucaagguacuugaucuucacagcaauaaaauaaagagcauuccuaaacaagucguaaaacuggaagcuuugcaagaacucaauguugcuuucaauucuuuaacugaccuuccuggauguggcagcuuuagcagccuuucuguauugaucauugaucacaauucaguuucccacccaucggcugauuucuuccagagcugccagaagaugaggucaauaaaagcaggggacaauccauuccaauguaccugugagcuaagagaauuugucaaaaauauagaccaaguaucaagugaaguguuagagggcuggccugauucuuauaagugugacuacccagaaaguuauagaggaagcccacuaaaggacuuucacaugucugaauuauccugcaacauaacucugcugaucgucaccaucggugccaccaugcugguguuggcugugacugugaccucccucugcaucuacuuggaucugcccugguaucucaggauggugugccaguggacccagacucggcgcagggccaggaacauacccuuagaagaacuccaaagaaaccuccaguuucaugcuuuuauuucauauagugaacaugauucugccugggugaaaagugaauugguaccuuaccuagaaaaagaagauauacagauuugucuucaugagagaaacuuugucccuggcaagagcauuguggaaaauaucaucaacugcauugagaagaguuacaaguccaucuuuguuuugucucccaacuuuguccagagugaguggugccauuacgaacucuauuuugcccaucacaaucucuuucaugaaggaucuaauaacuuaauccucaucuuacuggaacccauuccacagaacagcauucccaacaaguaccacaagcugaaggcucucaugaugcagcggacuuauuugcaguggcccaaggagaaaagcaaacgugggcucuuuugggcuaacauuagagccgcuuuuaauaugaaauuaacacuagucacugaaaacaaugaugugaaaucuuaa

SEQ ID NO: 9720 - RNA, 2391 nt, Artificial Sequence
  derived and/or modified sequence opt1 from TLR6__Homo_sapiens__AAY88755
augaccaaggacaaggagcccaucgucaagagcuuccacuucgugugccugaugaucaucaucgugggcacccgcauccaguucuccgacgggaacgaguucgccguggacaagagcaagcggggccucauccacgucccgaaggaccugccccugaagacgaaggugcucgacaugucccagaacuacaucgccgagcuccaggugagcgacauguccuuccugagcgagcugaccguccugcgccugucccacaaccggauccagcuccuggaccugagcguguucaaguucaaccaggaccucgaguaccuggaccugucccacaaccagcuccagaagaucagcugccaccccaucguguccuuccgccaccuggaccugagcuucaacgacuucaaggcgcuccccaucugcaaggaguucgggaaccugucccagcugaacuuccucggccugagcgccaugaagcugcagaagcucgaccugcugccgaucgcccaccuccaccuguccuacauccugcucgaccugcggaacuacuacaucaaggagaacgagaccgagagccugcagauccucaacgccaagacccugcaccuggucuuccaccccacgucccucuucgccauccaggugaacaucagcgugaacacccuggggugccugcagcucaccaacaucaagcugaacgacgacaacugccaggucuucaucaaguuccuguccgagcucacccgcggccccacgcugcugaacuucacccucaaccacaucgagaccaccuggaagugccuggugcggguguuccaguuccuguggcccaagccggucgaguaccucaacaucuacaaccugacgaucaucgagagcauccgcgaggaggacuucaccuacagcaagaccacccugaaggcgcugacgaucgagcacaucaccaaccagguguuccucuucucccagaccgcccuguacaccguguucagcgagaugaacaucaugaugcugacgaucuccgacacccccuucauccacaugcucugcccccacgcccccagcaccuucaaguuccugaacuucacccagaacgucuucacggacuccaucuucgagaagugcagcacccuggugaagcucgagacccugauccugcagaagaacggccucaaggaccuguucaagguggggcugaugaccaaggacaugccgucccucgagauccuggacgucagcuggaacucccuggagagcggccggcacaaggagaacugcacguggguggaguccaucgugguccucaaccugagcuccaacaugcugaccgacagcguguuccgcugccucccgccccggaucaagguccuggaccugcacuccaacaagaucaagagcauccccaagcaggucgugaagcucgaggcccugcaggagcugaacguggcguucaacucccucaccgaccugcccgggugcggcagcuucuccagccugagcgugcucaucaucgaccacaacuccgugagccaccccuccgccgacuucuuccagagcugccagaagaugcgcuccaucaaggccggggacaaccccuuccagugcacgugcgagcugcgggaguucgucaagaacaucgaccaggugagcuccgaggugcuggagggcuggcccgacagcuacaagugcgacuacccggaguccuaccgcggcagcccccucaaggacuuccacauguccgagcugagcugcaacaucacccugcucaucgucaccaucggggccaccaugcuggugcuggccgugaccgucacgucccucugcaucuaccuggaccugcccugguaccuccggauggugugccaguggacccagacccgccggcgcgcgcggaacaucccccuggaggagcugcagcgcaaccuccaguuccacgccuucaucagcuacuccgagcacgacagcgccugggugaaguccgagcuggucccguaccuggagaaggaggacauccagaucugccuccacgagcggaacuucgugcccggcaagagcaucguggagaacaucaucaacugcaucgagaaguccuacaagagcaucuucguccugagccccaacuucgugcaguccgaguggugccacuacgagcuguacuucgcccaccacaaccucuuccacgaggggagcaacaaccugauccugauccuccuggagcccaucccgcagaacuccauccccaacaaguaccacaagcugaaggcccucaugaugcagcgcaccuaccugcaguggcccaaggagaaguccaagcgcggccuguucugggcgaacauccgggccgccuucaacaugaagcucacccuggugacggagaacaacgacgucaagagcuga

SEQ ID NO: 9721 - RNA, 2391 nt, Artificial Sequence
  derived and/or modified sequence opt2 from TLR6__Homo_sapiens__AAY88755
augaccaaggacaaggagcccaucgucaaguccuuccacuucgucugccucaugaucaucaucgucggcacccgcauccaguucuccgacggcaacgaguucgccgucgacaaguccaagcgcggccucauccacguccccaaggaccucccccucaagaccaagguccucgacaugucccagaacuacaucgccgagcuccaggucuccgacauguccuuccucuccgagcucaccguccuccgccucucccacaaccgcauccagcuccucgaccucuccgucuucaaguucaaccaggaccucgaguaccucgaccucucccacaaccagcuccagaagaucuccugccaccccaucgucuccuuccgccaccucgaccucuccuucaacgacuucaaggcccuccccaucugcaaggaguucggcaaccucucccagcucaacuuccucggccucuccgccaugaagcuccagaagcucgaccuccuccccaucgcccaccuccaccucuccuacauccuccucgaccuccgcaacuacuacaucaaggagaacgagaccgagucccuccagauccucaacgccaagacccuccaccucgucuuccaccccaccucccucuucgccauccaggucaacaucuccgucaacacccucggcugccuccagcucaccaacaucaagcucaacgacgacaacugccaggucuucaucaaguuccucuccgagcucacccgcggccccacccuccucaacuucacccucaaccacaucgagaccaccuggaagugccucguccgcgucuuccaguuccucuggcccaagcccgucgaguaccucaacaucuacaaccucaccaucaucgaguccauccgcgaggaggacuucaccuacuccaagaccacccucaaggcccucaccaucgagcacaucaccaaccaggucuuccucuucucccagaccgcccucuacaccgucuucuccgagaugaacaucaugaugcucaccaucuccgacacccccuucauccacaugcucugcccccacgcccccuccaccuucaaguuccucaacuucacccagaacgucuucaccgacuccaucuucgagaagugcuccacccucgucaagcucgagacccucauccuccagaagaacggccucaaggaccucuucaaggucggccucaugaccaaggacaugcccucccucgagauccucgacgucuccuggaacucccucgaguccggccgccacaaggagaacugcaccugggucgaguccaucgucguccucaaccucuccuccaacaugcucaccgacuccgucuuccgcugccuccccccccgcaucaagguccucgaccuccacuccaacaagaucaaguccauccccaagcaggucgucaagcucgaggcccuccaggagcucaacgucgccuucaacucccucaccgaccuccccggcugcggcuccuucuccucccucuccguccucaucaucgaccacaacuccgucucccaccccuccgccgacuucuuccaguccugccagaagaugcgcuccaucaaggccggcgacaaccccuuccagugcaccugcgagcuccgcgaguucgucaagaacaucgaccaggucuccuccgagguccucgagggcuggcccgacuccuacaagugcgacuaccccgaguccuaccgcggcuccccccucaaggacuuccacauguccgagcucuccugcaacaucacccuccucaucgucaccaucggcgccaccaugcucguccucgccgucaccgucaccucccucugcaucuaccucgaccuccccugguaccuccgcauggucugccaguggacccagacccgccgccgcgcccgcaacaucccccucgaggagcuccagcgcaaccuccaguuccacgccuucaucuccuacuccgagcacgacuccgccugggucaaguccgagcucguccccuaccucgagaaggaggacauccagaucugccuccacgagcgcaacuucguccccggcaaguccaucgucgagaacaucaucaacugcaucgagaaguccuacaaguccaucuucguccucucccccaacuucguccaguccgaguggugccacuacgagcucuacuucgcccaccacaaccucuuccacgagggcuccaacaaccucauccucauccuccucgagcccaucccccagaacuccauccccaacaaguaccacaagcucaaggcccucaugaugcagcgcaccuaccuccaguggcccaaggagaaguccaagcgcggccucuucugggccaacauccgcgccgccuucaacaugaagcucacccucgucaccgagaacaacgacgucaaguccuga

SEQ ID NO: 9722 - RNA, 2391 nt, Artificial Sequence
  derived and/or modified sequence opt3 from TLR6__Homo_sapiens__AAY88755
augaccaaggacaaagagcccaucgucaagagcuuccacuuugugugccugaugauuauaaucguuggcacaaggauucaguucuccgaugggaacgaauuugccguggacaaaucuaagagaggacucauccauguaccuaaagaucuuccacugaagacuaagguguuggacaugucacaaaauuacauugcugaguuacaggucagugauaugagcuuccuguccgaacuaacggugcuccggcugucucacaaccgcauccagcuucuggacuugucgguuuuuaaauucaaucaggaucucgaguaucuggaccugucacauaaccaacuccagaagauaagcugucacccgaucgugaguuuucgacauuuagaucuguccuucaaugacuuuaaagcacuucccauuugcaaggaguucgguaacuugucucagcugaauuuucuaggccucagcgccaugaaacugcagaaacuugaucuguugccuaucgcgcaccuccaccuguccuacauuuuacuggaccuccguaacuauuacaucaaggagaaugagaccgaaucacuucaaauacugaacgcuaagacauugcaucuagucuuccacccaacuucccuguuugccauucaggugaauaucagcguaaacacccucgggugucugcagcuuacaaauauuaagcugaacgaugacaauugccagguuuucaucaaauucuugucugagcucaccagaggacccacucuguuaaacuuuacacugaaccauaucgaaaccacguggaagugucuagugagggucuuccaauuucucuggccuaaaccaguggaguaucugaauauuuacaaccuuacuauaaucgaguccauucgggaagaggacuucaccuauucaaagacaacuuugaaagcacugaccaucgaacacauaacaaaucagguguuucucuucagccagaccgcccuguacacggucuuuagugagaugaacauuaugaugcuuacuaucucugauacacccuucauccacaugcugugcccucaugcuccauccaccuuuaaguucuugaauuuuacucaaaacguuuucacagacagcauuuuugaaaaguguucgacccucgugaaacuggagacguuaauccugcagaagaauggccuaaaagaucucuucaagguaggucugaugaccaaagacaugccgucucuugagauuuuggauguguccuggaacucacuggaaagugggcgccacaaggagaauugcacaugggucgaaagcauagugguucucaaccuguccucuaauauguuaacugacagcguguucagaugucugcccccuaggaucaagguccuugauuugcauucaaacaaaauuaagaguaucccaaaacaggugguaaagcucgaggcacugcaggaacuaaauguugccuuuaacucccugaccgaccuccccggaugcggcagcuucucuucacugagugugcuuaucauugaucacaauagcgucucccauccuucugcugacuuuuuccaaucgugucagaaaaugcggagcauaaaggccggcgauaacccauuucagugcacaugcgaguugcgcgaguucgugaagaacaucgaccaggucuccucagaagugcuggagggguggcccgacaguuacaaaugugauuauccggaaucuuaccgaggaagcccuuuaaaggacuuucacauguccgagcucucaugcaauauuacucugcuuaucguuaccauuggugcgacaaugcugguguuggcaguaaccgucacuagccucuguaucuaucuggaucuacccugguaccugagaauggugugccaauggacgcagacaaggcggcgugcccgcaacauaccacucgaagaacugcagagaaaucuucaguuccacgcuuuuaucucuuauuccgagcaugacagugccuggguuaaaagcgaauuggugccuuaccuggagaaggaagauauucaaaucuguuuacacgagaggaacuucguccccggcaaaucuauuguggagaauaucauaaacugcauugaaaaguccuauaagucaaucuuuguacucaguccaaauuucgugcagagcgaguggugucauuacgaacuguacuuugcacaccacaaccuuuuccaugaggggucgaauaaccugauucuaauccuccuggaacccauaccucagaauaguaucccaaacaaauaucacaaguugaaagcucugaugaugcagcggaccuacuuacaauggccgaaggagaaaucuaagcgaggacucuucugggccaauauucgcgcggccuuuaacaugaaacugacucuuguuaccgagaauaacgacgucaagagcuga

SEQ ID NO: 9723 - RNA, 2391 nt, Artificial Sequence
  derived and/or modified sequence opt4 from TLR6__Homo_sapiens__AAY88755
augaccaaggacaaggagcccaucgugaagagcuuccacuucgugugccugaugaucaucaucgugggcaccagaauccaguucagcgacggcaacgaguucgccguggacaagagcaagagaggccugauccacgugcccaaggaccugccccugaagaccaaggugcuggacaugagccagaacuacaucgccgagcugcaggugagcgacaugagcuuccugagcgagcugaccgugcugagacugagccacaacagaauccagcugcuggaccugagcguguucaaguucaaccaggaccuggaguaccuggaccugagccacaaccagcugcagaagaucagcugccaccccaucgugagcuucagacaccuggaccugagcuucaacgacuucaaggcccugcccaucugcaaggaguucggcaaccugagccagcugaacuuccugggccugagcgccaugaagcugcagaagcuggaccugcugcccaucgcccaccugcaccugagcuacauccugcuggaccugagaaacuacuacaucaaggagaacgagaccgagagccugcagauccugaacgccaagacccugcaccugguguuccaccccaccagccuguucgccauccaggugaacaucagcgugaacacccugggcugccugcagcugaccaacaucaagcugaacgacgacaacugccagguguucaucaaguuccugagcgagcugaccagaggccccacccugcugaacuucacccugaaccacaucgagaccaccuggaagugccuggugagaguguuccaguuccuguggcccaagcccguggaguaccugaacaucuacaaccugaccaucaucgagagcaucagagaggaggacuucaccuacagcaagaccacccugaaggcccugaccaucgagcacaucaccaaccagguguuccuguucagccagaccgcccuguacaccguguucagcgagaugaacaucaugaugcugaccaucagcgacacccccuucauccacaugcugugcccccacgcccccagcaccuucaaguuccugaacuucacccagaacguguucaccgacagcaucuucgagaagugcagcacccuggugaagcuggagacccugauccugcagaagaacggccugaaggaccuguucaaggugggccugaugaccaaggacaugcccagccuggagauccuggacgugagcuggaacagccuggagagcggcagacacaaggagaacugcaccuggguggagagcaucguggugcugaaccugagcagcaacaugcugaccgacagcguguucagaugccugccccccagaaucaaggugcuggaccugcacagcaacaagaucaagagcauccccaagcagguggugaagcuggaggcccugcaggagcugaacguggccuucaacagccugaccgaccugcccggcugcggcagcuucagcagccugagcgugcugaucaucgaccacaacagcgugagccaccccagcgccgacuucuuccagagcugccagaagaugagaagcaucaaggccggcgacaaccccuuccagugcaccugcgagcugagagaguucgugaagaacaucgaccaggugagcagcgaggugcuggagggcuggcccgacagcuacaagugcgacuaccccgagagcuacagaggcagcccccugaaggacuuccacaugagcgagcugagcugcaacaucacccugcugaucgugaccaucggcgccaccaugcuggugcuggccgugaccgugaccagccugugcaucuaccuggaccugcccugguaccugagaauggugugccaguggacccagaccagaagaagagccagaaacaucccccuggaggagcugcagagaaaccugcaguuccacgccuucaucagcuacagcgagcacgacagcgccugggugaagagcgagcuggugcccuaccuggagaaggaggacauccagaucugccugcacgagagaaacuucgugcccggcaagagcaucguggagaacaucaucaacugcaucgagaagagcuacaagagcaucuucgugcugagccccaacuucgugcagagcgaguggugccacuacgagcuguacuucgcccaccacaaccuguuccacgagggcagcaacaaccugauccugauccugcuggagcccaucccccagaacagcauccccaacaaguaccacaagcugaaggcccugaugaugcagagaaccuaccugcaguggcccaaggagaagagcaagagaggccuguucugggccaacaucagagccgccuucaacaugaagcugacccuggugaccgagaacaacgacgugaagagcuga

SEQ ID NO: 9724 - RNA, 2391 nt, Artificial Sequence
  derived and/or modified sequence opt5 from TLR6__Homo_sapiens__AAY88755
augaccaaggacaaagagcccaucgugaaguccuuccacuuugugugccugaugauuaucauuguuggcacaagaauccaguucuccgaugggaacgaauuugccguggacaaaucuaagcggggacucauucaugugccuaaagaucugccgcuuaagacgaagguccuggacaugagccaaaauuacaucgcugagcuccagguguccgauaugucuuuccugagcgaacuuaccguucugcgccucucccacaacagaauccagcugcuggaccucucuguguuuaaauucaaucaggaucuggaguaucuugaccugagccauaaccaacuccagaagauuuccugucaccccaucgucagcuuucggcaucuggaucuuucuuucaaugacuuuaaagcccugccuauuugcaaggaguucggcaaccucucccagcugaauuuucuggggcucagcgcgaugaaacugcagaagcucgaucugcuccccaucgcucaucugcaccuuucuuacauucugcucgaccugcgcaacuauuacaucaaggagaaugagacagaaucccugcaaauucucaacgccaaaacccugcaccuuguguuccacccuacaagccuguuugccauccagguuaauaucucugugaacacccucggaugucugcagcuuacaaauauuaagcugaacgaugacaauugccaggucuucaucaaauuccucuccgagcugaccagaggccccacgcugcucaacuuuacccugaaccauauugaaacaaccuggaagugucuugugcggguguuccaauuucuguggccuaaaccggucgaguaucucaauaucuacaaccugacaauuaucgagagcauccgcgaagaggacuucaccuauuccaagacgacacugaaagcucuuaccauugaacacaucacaaaucagguuuuucucuucucucagaccgcccuguacaccguguuuagcgagaugaacauuaugaugcugacaaucuccgauacgcccuucauucacaugcucugcccucaugcucccagcaccuuuaaguuccugaauuuuacacaaaacguguucaccgacucuaucuuugaaaaguguuccacacuugucaaacuggagacccucauccugcagaagaaugggcugaaagaucuuuucaaggugggacucaugacgaaagacaugccuagccuggagauucuggauguuucuuggaacagccucgaauccggcagacacaaggagaauugcacauggguggaaucuaucgucgugcugaaccuuagcuccaauaugcugaccgacagcguuuuccggugucuucccccgcgcauuaaggugcuggaucugcauucuaacaaaaucaaguccauuccuaaacaggucgugaaacuugaggcccuccaggaacugaaugucgcguuuaacagccugaccgaccuccccggcugcgggucuuucuccagccuguccgugcuuaucauugaucacaauucuguuagccauccuuccgccgacuuuuuccaaucuugucagaagaugagaagcaucaaggcuggagauaaccccuuucagugcacaugcgagcugcgggaguucgugaagaacaucgaccaggucuccagcgaagugcucgagggcuggcccgacucuuacaaaugugauuauccugaauccuaccgcgggagcccgcugaaggacuuucacaugucugagcuguccugcaauauuacccuucucaucguuacaauuggagccacgaugcuggugcuggcugucaccgugacaagccucuguaucuaucuggaucuucccugguaccugagaauggugugccaauggacccagacacggcgcagagcccggaacauuccucucgaagaacugcagagaaaucugcaguuccacgcguuuaucucuuauagcgagcaugacuccgccuggguuaaaagcgaacuuguccccuaccuggagaaggaagauauccaaauuugucuccacgagcgcaacuucgugccuggcaaaucuaucguggagaauauuaucaacugcauugaaaaguccuauaagagcaucuuuguccugucccccaauuucgugcagucugaguggugucauuacgaacucuacuuugcucaccacaaccuguuccaugaggggagcaauaaccuuauccugauucuccuggaaccgaucccucagaauagcauucccaacaaauaucacaagcugaaagcccuuaugaugcagcggaccuaccugcaauggccuaaggagaaaucuaagagaggacucuucugggcuaauauccgcgccgccuuuaacaugaaacugacgcucguuaccgagaauaacgacgucaagagcuga

SEQ ID NO: 9725 - protein, 796 aa, Artificial Sequence [sequence omitted]

SEQ ID NO: 9726 - RNA, 2391 nt, Artificial Sequence
  TLR6__Homo_sapiens__AAY88758
augaccaaagacaaagaaccuauuguuaaaagcuuccauuuuguuugccuuaugaucauaauaguuggaaccagaauccaguucuccgacggaaaugaauuugcaguagacaagucaaaaagaggucuuauucauguuccaaaagaccuaccgcugaaaaccaaagucuuagauaugucucagaacuacaucgcugagcuucaggucucugacaugagcuuucuaucagaguugacaguuuugagacuuucccauaacagaauccagcuacuugauuuaaguguuuucaaguucaaccaggauuuagaauauuuggauuuaucucauaaucaguugcaaaagauauccugccauccuauugugaguuucaggcauuuagaucucucauucaaugauuucaaggcccugcccaucuguaaggaauuuggcaacuuaucacaacugaauuucuugggauugagugcuaugaagcugcaaaaauuagauuugcugccaauugcucacuugcaucuaaguuauauccuucuggauuuaagaaauuauuauauaaaagaaaaugagacagaaagucuacaaauucugaaugcaaaaacccuucaccuuguuuuucacccaacuaguuuauucgcuauccaagugaacauaucaguuaauacuuuagggugcuuacaacugacuaauauuaaauugaaugaugacaacugucaaguuuucauuaaauuuuuaucagaacucaccagagguccaaccuuacugaauuuuacccucaaccacauagaaacgacuuggaaaugccuggucagagucuuucaauuucuuuggcccaaaccuguggaauaucucaauauuuacaauuuaacaauaauugaaagcauucgugaagaagauuuuacuuauucuaaaacgacauugaaagcauugacaauagaacauaucacgaaccaaguuuuucuguuuucacagacagcuuuguacaccguguuuucugagaugaacauuaugauguuaaccauuucagauacaccuuuuauacacaugcuguguccucaugcaccaagcacauucaaguuuuugaacuuuacccagaacguuuucacagauaguauuuuugaaaaauguuccacguuaguuaaauuggagacacuuaucuuacaaaagaauggauuaaaagaccuuuucaaaguaggucucaugacgaaggauaugccuucuuuggaaauacuggauguuagcuggaauucuuuggaaucugguagacauaaggaaaacugcacuuggguugagaguauagugguguuaaauuugucuucaaauaugcuuacugacucuguuuucagauguuuaccucccaggaucaagguacuugaucuucacagcaauaaaauaaagagcauuccuaaacaagucguaaaacuggaagcuuugcaagaacucaauguugcuuucaauucuuuaacugaccuuccuggauguggcagcuuuagcagccuuucuguauugaucauugaucacaauucaguuucccacccaucggcugauuucuuccagagcugccagaagaugaggucaauaaaagcaggggacaauccauuccaauguaccugugagcuaagagaauuugucaaaaauauagaccaaguaucaagugaaguguuagagggcuggccugauucuuauaagugugacuacccagaaaguuauagaggaagcccacuaaaggacuuucacaugucugaauuauccugcaacauaacucugcugaucgucaccaucggugccaccaugcugguguuggcugugacugugaccucccucugcaucuacuuggaucugcccugguaucucaggauggugugccaguggacccagacucggcgcagggccaggaacauacccuuagaagaacuccaaagaaaccuccaguuucaugcuuuuauuucauauagugaacaugauucugccugggugaaaagugaauugguaccuuaccuagaaaaagaagauauacagauuugucuucaugagagaaacuuugucccuggcaagagcauuguggaaaauaucaucaacugcauugagaagaguuacaaguccaucuuuguuuugucucccaacuuuguccagagugaguggugccauuacgaacucuauuuugcccaucacaaucucuuucaugaaggaucuaauaacuuaauccucaucuuacuggaacccauucuacagaacagcauucccaacaaguaccacaagcugaaggcucucaugaugcagcggacuuauuugcaguggcccaaggagaaaagcaaacgugggcucuuuugggcuaacauuagagccgcuuuuaauaugaaauuaacacuagucacugaaaacaaugaugugaaaucuuaa

SEQ ID NO: 9727 - RNA, 2391 nt, Artificial Sequence
  derived and/or modified sequence opt1 from TLR6__Homo_sapiens__AAY88758
augaccaaggacaaggagcccaucgucaagagcuuccacuucgugugccugaugaucaucaucgugggcacccgcauccaguucuccgacgggaacgaguucgccguggacaagagcaagcggggccucauccacgucccgaaggaccugccccugaagacgaaggugcucgacaugucccagaacuacaucgccgagcuccaggugagcgacauguccuuccugagcgagcugaccguccugcgccugucccacaaccggauccagcuccuggaccugagcguguucaaguucaaccaggaccucgaguaccuggaccugucccacaaccagcuccagaagaucagcugccaccccaucguguccuuccgccaccuggaccugagcuucaacgacuucaaggcgcuccccaucugcaaggaguucgggaaccugucccagcugaacuuccucggccugagcgccaugaagcugcagaagcucgaccugcugccgaucgcccaccuccaccuguccuacauccugcucgaccugcggaacuacuacaucaaggagaacgagaccgagagccugcagauccucaacgccaagacccugcaccuggucuuccaccccacgucccucuucgccauccaggugaacaucagcgugaacacccuggggugccugcagcucaccaacaucaagcugaacgacgacaacugccaggucuucaucaaguuccuguccgagcucacccgcggccccacgcugcugaacuucacccucaaccacaucgagaccaccuggaagugccuggugcggguguuccaguuccuguggcccaagccggucgaguaccucaacaucuacaaccugacgaucaucgagagcauccgcgaggaggacuucaccuacagcaagaccacccugaaggcgcugacgaucgagcacaucaccaaccagguguuccucuucucccagaccgcccuguacaccguguucagcgagaugaacaucaugaugcugacgaucuccgacacccccuucauccacaugcucugcccccacgcccccagcaccuucaaguuccugaacuucacccagaacgucuucacggacuccaucuucgagaagugcagcacccuggugaagcucgagacccugauccugcagaagaacggccucaaggaccuguucaagguggggcugaugaccaaggacaugccgucccucgagauccuggacgucagcuggaacucccuggagagcggccggcacaaggagaacugcacguggguggaguccaucgugguccucaaccugagcuccaacaugcugaccgacagcguguuccgcugccucccgccccggaucaagguccuggaccugcacuccaacaagaucaagagcauccccaagcaggucgugaagcucgaggcccugcaggagcugaacguggcguucaacucccucaccgaccugcccgggugcggcagcuucuccagccugagcgugcucaucaucgaccacaacuccgugagccaccccuccgccgacuucuuccagagcugccagaagaugcgcuccaucaaggccggggacaaccccuuccagugcacgugcgagcugcgggaguucgucaagaacaucgaccaggugagcuccgaggugcuggagggcuggcccgacagcuacaagugcgacuacccggaguccuaccgcggcagcccccucaaggacuuccacauguccgagcugagcugcaacaucacccugcucaucgucaccaucggggccaccaugcuggugcuggccgugaccgucacgucccucugcaucuaccuggaccugcccugguaccuccggauggugugccaguggacccagacccgccggcgcgcgcggaacaucccccuggaggagcugcagcgcaaccuccaguuccacgccuucaucagcuacuccgagcacgacagcgccugggugaaguccgagcuggucccguaccuggagaaggaggacauccagaucugccuccacgagcggaacuucgugcccggcaagagcaucguggagaacaucaucaacugcaucgagaaguccuacaagagcaucuucguccugagccccaacuucgugcaguccgaguggugccacuacgagcuguacuucgcccaccacaaccucuuccacgaggggagcaacaaccugauccugauccuccuggagcccauccugcagaacuccaucccgaacaaguaccacaagcucaaggcccugaugaugcagcgcaccuaccugcaguggcccaaggagaaguccaagcgcggccucuucugggcgaacauccgggccgccuucaacaugaagcugacccuggugacggagaacaacgacgucaagagcuga

SEQ ID NO: 9728 - RNA, 2391 nt, Artificial Sequence
  derived and/or modified sequence opt2 from TLR6__Homo_sapiens__AAY88758
augaccaaggacaaggagcccaucgucaaguccuuccacuucgucugccucaugaucaucaucgucggcacccgcauccaguucuccgacggcaacgaguucgccgucgacaaguccaagcgcggccucauccacguccccaaggaccucccccucaagaccaagguccucgacaugucccagaacuacaucgccgagcuccaggucuccgacauguccuuccucuccgagcucaccguccuccgccucucccacaaccgcauccagcuccucgaccucuccgucuucaaguucaaccaggaccucgaguaccucgaccucucccacaaccagcuccagaagaucuccugccaccccaucgucuccuuccgccaccucgaccucuccuucaacgacuucaaggcccuccccaucugcaaggaguucggcaaccucucccagcucaacuuccucggccucuccgccaugaagcuccagaagcucgaccuccuccccaucgcccaccuccaccucuccuacauccuccucgaccuccgcaacuacuacaucaaggagaacgagaccgagucccuccagauccucaacgccaagacccuccaccucgucuuccaccccaccucccucuucgccauccaggucaacaucuccgucaacacccucggcugccuccagcucaccaacaucaagcucaacgacgacaacugccaggucuucaucaaguuccucuccgagcucacccgcggccccacccuccucaacuucacccucaaccacaucgagaccaccuggaagugccucguccgcgucuuccaguuccucuggcccaagcccgucgaguaccucaacaucuacaaccucaccaucaucgaguccauccgcgaggaggacuucaccuacuccaagaccacccucaaggcccucaccaucgagcacaucaccaaccaggucuuccucuucucccagaccgcccucuacaccgucuucuccgagaugaacaucaugaugcucaccaucuccgacacccccuucauccacaugcucugcccccacgcccccuccaccuucaaguuccucaacuucacccagaacgucuucaccgacuccaucuucgagaagugcuccacccucgucaagcucgagacccucauccuccagaagaacggccucaaggaccucuucaaggucggccucaugaccaaggacaugcccucccucgagauccucgacgucuccuggaacucccucgaguccggccgccacaaggagaacugcaccugggucgaguccaucgucguccucaaccucuccuccaacaugcucaccgacuccgucuuccgcugccuccccccccgcaucaagguccucgaccuccacuccaacaagaucaaguccauccccaagcaggucgucaagcucgaggcccuccaggagcucaacgucgccuucaacucccucaccgaccuccccggcugcggcuccuucuccucccucuccguccucaucaucgaccacaacuccgucucccaccccuccgccgacuucuuccaguccugccagaagaugcgcuccaucaaggccggcgacaaccccuuccagugcaccugcgagcuccgcgaguucgucaagaacaucgaccaggucuccuccgagguccucgagggcuggcccgacuccuacaagugcgacuaccccgaguccuaccgcggcuccccccucaaggacuuccacauguccgagcucuccugcaacaucacccuccucaucgucaccaucggcgccaccaugcucguccucgccgucaccgucaccucccucugcaucuaccucgaccuccccugguaccuccgcauggucugccaguggacccagacccgccgccgcgcccgcaacaucccccucgaggagcuccagcgcaaccuccaguuccacgccuucaucuccuacuccgagcacgacuccgccugggucaaguccgagcucguccccuaccucgagaaggaggacauccagaucugccuccacgagcgcaacuucguccccggcaaguccaucgucgagaacaucaucaacugcaucgagaaguccuacaaguccaucuucguccucucccccaacuucguccaguccgaguggugccacuacgagcucuacuucgcccaccacaaccucuuccacgagggcuccaacaaccucauccucauccuccucgagcccauccuccagaacuccauccccaacaaguaccacaagcucaaggcccucaugaugcagcgcaccuaccuccaguggcccaaggagaaguccaagcgcggccucuucugggccaacauccgcgccgccuucaacaugaagcucacccucgucaccgagaacaacgacgucaaguccuga

SEQ ID NO: 9729 - RNA, 2391 nt, Artificial Sequence
  derived and/or modified sequence opt3 from TLR6__Homo_sapiens__AAY88758
augaccaaggacaaagagcccaucgucaagagcuuccacuuugugugccugaugauuauaaucguuggcacaaggauucaguucuccgaugggaacgaauuugccguggacaaaucuaagagaggacucauccauguaccuaaagaucuuccacugaagacuaagguguuggacaugucacaaaauuacauugcugaguuacaggucagugauaugagcuuccuguccgaacuaacggugcuccggcugucucacaaccgcauccagcuucuggacuugucgguuuuuaaauucaaucaggaucucgaguaucuggaccugucacauaaccaacuccagaagauaagcugucacccgaucgugaguuuucgacauuuagaucuguccuucaaugacuuuaaagcacuucccauuugcaaggaguucgguaacuugucucagcugaauuuucuaggccucagcgccaugaaacugcagaaacuugaucuguugccuaucgcgcaccuccaccuguccuacauuuuacuggaccuccguaacuauuacaucaaggaaaaugagaccgaaucacuucaaauacugaacgcuaaaacauugcaucuagucuuccacccaacuucccuguuugccauucaggugaauaucagcguaaacacccucgggugucugcagcuuacaaauauuaagcugaacgaugacaauugccagguuuucaucaaauucuugucugagcucaccagaggacccacucuguuaaacuuuacacugaaccauaucgaaaccacguggaagugucuagugagggucuuccaauuucucuggccuaaaccaguggaguaucugaauauuuacaaccuuacuauaaucgaguccauucgggaagaggacuucaccuauucaaagacaacuuugaaagcacugaccaucgaacacauaacaaaucagguguuucucuucagccagaccgcccuguacacggucuuuagugagaugaacauuaugaugcuuacuaucucugauacacccuucauccacaugcugugcccucaugcuccauccaccuuuaaguucuugaauuuuacucaaaacguuuucacagacagcauuuuugaaaaguguucgacccucgugaaacuggagacguuaauccugcagaagaauggccuaaaagaucucuucaagguaggucugaugaccaaagacaugccgucucuugagauuuuggauguguccuggaacucacuggaaagugggcgccacaaggagaauugcacaugggucgaaagcauagugguucucaaccuguccucuaauauguuaacugacagcguguucagaugucugcccccuaggaucaagguccuugauuugcauucaaacaaaauuaagaguaucccaaaacaggugguaaagcucgaggcacugcaggaacuaaauguugccuuuaacucccugaccgaccuccccggaugcggcagcuucucuucacugagugugcuuaucauugaucacaauagcgucucccauccuucugcugacuuuuuccaaucgugucagaaaaugcggagcauaaaggccggcgauaacccauuucagugcacaugcgaguugcgcgaguucgugaagaacaucgaccaggucuccucagaagugcuggagggguggcccgacaguuacaaaugugauuauccggaaucuuaccgaggaagcccuuuaaaggacuuucacauguccgagcucucaugcaauauuacucugcuuaucguuaccauuggugcgacaaugcugguguuggcaguaaccgucacuagccucuguaucuaucuggaucuacccugguaccugagaauggugugccaauggacgcagacaaggcggcgugcccgcaacauaccacucgaggaacugcagagaaaucuucaguuccacgcuuuuaucucuuauuccgagcaugacagugccuggguuaaaagcgaauuggugccuuaccuggagaaggaagauauucaaaucuguuuacacgagaggaacuucguccccggcaaaucuauuguggagaauaucauaaacugcauugaaaaguccuauaagucaaucuuuguacucaguccaaauuucgugcagagcgaguggugucauuacgaacuguacuuugcacaccacaaccuuuuccaugaggggucgaauaaccugauucuaauccuccuggaacccauauugcagaauaguaucccuaacaaauaucacaagcugaaggcuuuaaugaugcagcggaccuaccuccaauggccaaaggagaaaucuaagcgaggacuguucugggccaauauucgcgcggccuuuaacaugaaacuuacucugguuaccgagaauaacgacgucaagagcuga

SEQ ID NO: 9730 - RNA, 2391 nt, Artificial Sequence
  derived and/or modified sequence opt4 from TLR6__Homo_sapiens__AAY88758
augaccaaggacaaggagcccaucgugaagagcuuccacuucgugugccugaugaucaucaucgugggcaccagaauccaguucagcgacggcaacgaguucgccguggacaagagcaagagaggccugauccacgugcccaaggaccugccccugaagaccaaggugcuggacaugagccagaacuacaucgccgagcugcaggugagcgacaugagcuuccugagcgagcugaccgugcugagacugagccacaacagaauccagcugcuggaccugagcguguucaaguucaaccaggaccuggaguaccuggaccugagccacaaccagcugcagaagaucagcugccaccccaucgugagcuucagacaccuggaccugagcuucaacgacuucaaggcccugcccaucugcaaggaguucggcaaccugagccagcugaacuuccugggccugagcgccaugaagcugcagaagcuggaccugcugcccaucgcccaccugcaccugagcuacauccugcuggaccugagaaacuacuacaucaaggagaacgagaccgagagccugcagauccugaacgccaagacccugcaccugguguuccaccccaccagccuguucgccauccaggugaacaucagcgugaacacccugggcugccugcagcugaccaacaucaagcugaacgacgacaacugccagguguucaucaaguuccugagcgagcugaccagaggccccacccugcugaacuucacccugaaccacaucgagaccaccuggaagugccuggugagaguguuccaguuccuguggcccaagcccguggaguaccugaacaucuacaaccugaccaucaucgagagcaucagagaggaggacuucaccuacagcaagaccacccugaaggcccugaccaucgagcacaucaccaaccagguguuccuguucagccagaccgcccuguacaccguguucagcgagaugaacaucaugaugcugaccaucagcgacacccccuucauccacaugcugugcccccacgcccccagcaccuucaaguuccugaacuucacccagaacguguucaccgacagcaucuucgagaagugcagcacccuggugaagcuggagacccugauccugcagaagaacggccugaaggaccuguucaaggugggccugaugaccaaggacaugcccagccuggagauccuggacgugagcuggaacagccuggagagcggcagacacaaggagaacugcaccuggguggagagcaucguggugcugaaccugagcagcaacaugcugaccgacagcguguucagaugccugccccccagaaucaaggugcuggaccugcacagcaacaagaucaagagcauccccaagcagguggugaagcuggaggcccugcaggagcugaacguggccuucaacagccugaccgaccugcccggcugcggcagcuucagcagccugagcgugcugaucaucgaccacaacagcgugagccaccccagcgccgacuucuuccagagcugccagaagaugagaagcaucaaggccggcgacaaccccuuccagugcaccugcgagcugagagaguucgugaagaacaucgaccaggugagcagcgaggugcuggagggcuggcccgacagcuacaagugcgacuaccccgagagcuacagaggcagcccccugaaggacuuccacaugagcgagcugagcugcaacaucacccugcugaucgugaccaucggcgccaccaugcuggugcuggccgugaccgugaccagccugugcaucuaccuggaccugcccugguaccugagaauggugugccaguggacccagaccagaagaagagccagaaacaucccccuggaggagcugcagagaaaccugcaguuccacgccuucaucagcuacagcgagcacgacagcgccugggugaagagcgagcuggugcccuaccuggagaaggaggacauccagaucugccugcacgagagaaacuucgugcccggcaagagcaucguggagaacaucaucaacugcaucgagaagagcuacaagagcaucuucgugcugagccccaacuucgugcagagcgaguggugccacuacgagcuguacuucgcccaccacaaccuguuccacgagggcagcaacaaccugauccugauccugcuggagcccauccugcagaacagcauccccaacaaguaccacaagcugaaggcccugaugaugcagagaaccuaccugcaguggcccaaggagaagagcaagagaggccuguucugggccaacaucagagccgccuucaacaugaagcugacccuggugaccgagaacaacgacgugaagagcuga

SEQ ID NO: 9731 - RNA, 2391 nt, Artificial Sequence
  derived and/or modified sequence opt5 from TLR6__Homo_sapiens__AAY88758
augaccaaggacaaagagcccaucgugaaguccuuccacuuugugugccugaugauuaucauuguuggcacaagaauccaguucuccgaugggaacgaauuugccguggacaaaucuaagcggggacucauucaugugccuaaagaucugccgcuuaagacgaagguccuggacaugagccaaaauuacaucgcugagcuccagguguccgauaugucuuuccugagcgaacuuaccguucugcgccucucccacaacagaauccagcugcuggaccucucuguguuuaaauucaaucaggaucuggaguaucuugaccugagccauaaccaacuccagaagauuuccugucaccccaucgucagcuuucggcaucuggaucuuucuuucaaugacuuuaaagcccugccuauuugcaaggaguucggcaaccucucccagcugaauuuucuggggcucagcgcgaugaaacugcagaagcucgaucugcuccccaucgcucaucugcaccuuucuuacauucugcucgaccugcgcaacuauuacaucaaggaaaaugagacagaaucccugcaaauucucaacgccaaaacccugcaccuuguguuccacccuacaagccuguuugccauccagguuaauaucucugugaacacccucggaugucugcagcuuacaaauauuaagcugaacgaugacaauugccaggucuucaucaaauuccucuccgagcugaccagaggccccacgcugcucaacuuuacccugaaccauauugaaacaaccuggaagugucuugugcggguguuccaauuucuguggccuaaaccggucgaguaucucaauaucuacaaccugacaauuaucgagagcauccgcgaagaggacuucaccuauuccaagacgacacugaaagcucuuaccauugaacacaucacaaaucagguuuuucucuucucucagaccgcccuguacaccguguuuagcgagaugaacauuaugaugcugacaaucuccgauacgcccuucauucacaugcucugcccucaugcucccagcaccuuuaaguuccugaauuuuacacaaaacguguucaccgacucuaucuuugaaaaguguuccacacuugucaaacuggagacccucauccugcagaagaaugggcugaaagaucuuuucaaggugggacucaugacgaaagacaugccuagccuggagauucuggauguuucuuggaacagccucgaauccggcagacacaaggagaauugcacauggguggaaucuaucgucgugcugaaccuuagcuccaauaugcugaccgacagcguuuuccggugucuucccccgcgcauuaaggugcuggaucugcauucuaacaaaaucaaguccauuccuaaacaggucgugaaacuugaggcccuccaggaacugaaugucgcguuuaacagccugaccgaccuccccggcugcgggucuuucuccagccuguccgugcuuaucauugaucacaauucuguuagccauccuuccgccgacuuuuuccaaucuugucagaagaugagaagcaucaaggcuggagauaaccccuuucagugcacaugcgagcugcgggaguucgugaagaacaucgaccaggucuccagcgaagugcucgagggcuggcccgacucuuacaaaugugauuauccugaauccuaccgcgggagcccgcugaaggacuuucacaugucugagcuguccugcaauauuacccuucucaucguuacaauuggagccacgaugcuggugcuggcugucaccgugacaagccucuguaucuaucuggaucuucccugguaccugagaauggugugccaauggacccagacacggcgcagagcccggaacauuccucucgaggaacugcagagaaaucugcaguuccacgcguuuaucucuuauagcgagcaugacuccgccuggguuaaaagcgaacuuguccccuaccuggagaaggaagauauccaaauuugucuccacgagcgcaacuucgugccuggcaaaucuaucguggagaauauuaucaacugcauugaaaaguccuauaagagcaucuuuguccugucccccaauuucgugcagucugaguggugucauuacgaacucuacuuugcucaccacaaccuguuccaugaggggagcaauaaccuuauccugauucuccuggaaccgauccugcagaauagcauuccuaacaaauaucacaaacuuaaggcccugaugaugcagcggaccuaccuccaauggcccaaggagaaaucuaagagaggacuguucugggcuaauauccgcgccgccuuuaacaugaaacucacgcugguuaccgagaauaacgacgucaagagcuga

SEQ ID NO: 9732 - protein, 796 aa, Artificial Sequence [sequence omitted]

SEQ ID NO: 9733 - RNA, 2391 nt, Artificial Sequence
  TLR6__Homo_sapiens__AAY88759
augaccaaagacaaagaaccuauuguuaaaagcuuccauuuuguuugccuuaugaucauaauaguuggaaccagaauccaguucuccgacggaaaugaauuugcaguagacaagucaaaaagaggucuuauucauguuccaaaagaccuaccgcugaaaaccaaagucuuagauaugucucagaacuacaucgcugagcuucaggucucugacaugagcuuucuaucagaguugacaguuuugagacuuucccauaacagaauccagcuacuugauuuaaguguuuucaaguucaaccaggauuuagaauauuuggauuuaucucauaaucaguugcaaaagauauccugccauccuauugugaguuucaggcauuuagaucucucauucaaugauuucaaggcccugcccaucuguaaggaauuuggcaacuuaucacaacugaauuucuugggauugagugcuaugaagcugcaaaaauuagauuugcugccaauugcucacuugcaucuaaguuauauccuucuggauuuaagaaauuauuauauaaaagaaaaugagacagaaagucuacaaauucugaaugcaaaaacccuucaccuuguuuuucacccaacuaguuuauucgcuauccaagugaacauaucaguuaauacuuuagggugcuuacaacugacuaauauuaaauugaaugaugacaacugucaaguuuucauuaaauuuuuaucagaacucaccagagguccaaccuuacugaauuuuacccucaaccacauagaaacgacuuggaaaugccuggucagagucuuucaauuucuuuggcccaaaccuguggaauaucucaauauuuacaauuuaacaauaauugaaagcauucgugaagaagauuuuacuuauucuaaaacgacauugaaagcauugacaauagaacauaucacgaaccaaguuuuucuguuuucacagacagcuuuguacaccguguuuucugagaugaacauuaugauguuaaccauuucagauacaccuuuuauacacaugcuguguccucaugcaccaagcacauucaaguuuuugaacuuuacccagaacguuuucacagauaguauuuuugaaaaauguuccacguuaguuaaauuggagacacuuaucuuacaaaagaauggauuaaaagaccuuuucaaaguaggucucaugacgaaggauaugccuucuuuggaaauacuggauguuagcuggaauucuuuggaaucugguagacauaaagaaaacugcacuuggguugagaguauagugguguuaaauuugucuucaaauaugcuuacugacucuguuuucagauguuuaccucccaggaucaagguacuugaucuucacagcaauaaaauaaagagcguuccuaaacaagucguaaaacuggaagcuuugcaagaacucaauguugcuuucaauucuuuaacugaccuuccuggauguggcagcuuuagcagccuuucuguauugaucauugaucacaauucaguuucccacccaucggcugauuucuuccagagcugccagaagaugaggucaauaaaagcaggggacaauccauuccaauguaccugugagcuaagagaauuugucaaaaauauagaccaaguaucaagugaaguguuagagggcuggccugauucuuauaagugugacuacccagaaaguuauagaggaagcccacuaaaggacuuucacaugucugaauuauccugcaacauaacucugcugaucgucaccaucggugccaccaugcugguguuggcugugacugugaccucccucugcaucuacuuggaucugcccugguaucucaggauggugugccaguggacccagacucggcgcagggccaggaacauacccuuagaagaacuccaaagaaaccuccaguuucaugcuuuuauuucauauagugaacaugauucugccugggugaaaagugaauugguaccuuaccuagaaaaagaagauauacagauuugucuucaugagagaaacuuugucccuggcaagagcauuguggaaaauaucaucaacugcauugagaagaguuacaaguccaucuuuguuuugucucccaacuuuguccagagugaguggugccauuacgaacucuauuuugcccaucacaaucucuuucaugaaggaucuaauaacuuaauccucaucuuacuggaacccauuccacagaacagcauucccaacaaguaccacaagcugaaggcucucaugaugcagcggacuuauuugcaguggcccaaggagaaaagcaaacgugggcucuuuugggcuaacauuagagccgcuuuuaauaugaaauuaacacuagucacugaaaacaaugaugugaaaucuuaa

SEQ ID NO: 9734 - RNA, 2391 nt, Artificial Sequence
  derived and/or modified sequence opt1 from TLR6__Homo_sapiens__AAY88759
augaccaaggacaaggagcccaucgucaagagcuuccacuucgugugccugaugaucaucaucgugggcacccgcauccaguucagcgacgggaacgaguucgccguggacaagagcaagcggggccucauccacgucccgaaggaccugccccugaagacgaaggugcucgacaugucccagaacuacaucgccgagcuccaggugagcgacauguccuuccugagcgagcugaccguccugcgccugucccacaaccggauccagcuccuggaccugagcguguucaaguucaaccaggaccucgaguaccuggaccugucccacaaccagcuccagaagaucagcugccaccccaucguguccuuccgccaccuggaccugagcuucaacgacuucaaggcgcuccccaucugcaaggaguucgggaaccugucccagcugaacuuccucggccugagcgccaugaagcugcagaagcucgaccugcugccgaucgcccaccuccaccuguccuacauccugcucgaccugcggaacuacuacaucaaggagaacgagaccgagagccugcagauccucaacgccaagacccugcaccuggucuuccaccccacgucccucuucgccauccaggugaacaucagcgugaacacccuggggugccugcagcucaccaacaucaagcugaacgacgacaacugccaggucuucaucaaguuccuguccgagcucacccgcggccccacgcugcugaacuucacccucaaccacaucgagaccaccuggaagugccuggugcggguguuccaguuccuguggcccaagccggucgaguaccucaacaucuacaaccugacgaucaucgagagcauccgcgaggaggacuucaccuacagcaagaccacccugaaggcgcugacgaucgagcacaucaccaaccagguguuccucuucucccagaccgcccuguacaccguguucagcgagaugaacaucaugaugcugacgaucuccgacacccccuucauccacaugcucugcccccacgcccccagcaccuucaaguuccugaacuucacccagaacgucuucacggacuccaucuucgagaagugcagcacccuggugaagcucgagacccugauccugcagaagaacggccucaaggaccuguucaagguggggcugaugaccaaggacaugccgucccucgagauccuggacgucagcuggaacucccuggagagcggccggcacaaggagaacugcacguggguggaguccaucgugguccucaaccugagcuccaacaugcugaccgacagcguguuccgcugccucccgccccggaucaagguccuggaccugcacuccaacaagaucaagagcgugcccaagcaggucgugaagcucgaggcccugcaggagcugaacguggcguucaacucccucaccgaccugcccgggugcggcagcuucuccagccugagcgugcucaucaucgaccacaacuccgucagccaccccuccgccgacuucuuccagagcugccagaagaugcgcuccaucaaggccggggacaaccccuuccagugcacgugcgagcugcgggaguucgugaagaacaucgaccaggugagcuccgagguccuggagggcuggcccgacagcuacaagugcgacuacccggaguccuaccgcggcagcccccucaaggacuuccacauguccgagcugagcugcaacaucacccugcucaucgugaccaucggggccaccaugcuggugcuggccgucaccgugacgucccucugcaucuaccuggaccugcccugguaccuccggauggugugccaguggacccagacccgccggcgcgcgcggaacaucccccuggaggagcugcagcgcaaccuccaguuccacgccuucaucagcuacuccgagcacgacagcgccugggucaaguccgagcuggugccguaccuggagaaggaggacauccagaucugccuccacgagcggaacuucgugcccggcaagagcaucgucgagaacaucaucaacugcaucgagaaguccuacaagagcaucuucgugcugagccccaacuucgugcaguccgaguggugccacuacgagcuguacuucgcccaccacaaccucuuccacgaggggagcaacaaccugauccugauccuccuggagcccaucccgcagaacuccauccccaacaaguaccacaagcugaaggcccucaugaugcagcgcaccuaccugcaguggcccaaggagaaguccaagcgcggccuguucugggcgaacauccgggccgccuucaacaugaagcucacccuggucacggagaacaacgacgugaaguccuga

SEQ ID NO: 9735 - RNA, 2391 nt, Artificial Sequence
  derived and/or modified sequence opt2 from TLR6__Homo_sapiens__AAY88759
augaccaaggacaaggagcccaucgucaaguccuuccacuucgucugccucaugaucaucaucgucggcacccgcauccaguucuccgacggcaacgaguucgccgucgacaaguccaagcgcggccucauccacguccccaaggaccucccccucaagaccaagguccucgacaugucccagaacuacaucgccgagcuccaggucuccgacauguccuuccucuccgagcucaccguccuccgccucucccacaaccgcauccagcuccucgaccucuccgucuucaaguucaaccaggaccucgaguaccucgaccucucccacaaccagcuccagaagaucuccugccaccccaucgucuccuuccgccaccucgaccucuccuucaacgacuucaaggcccuccccaucugcaaggaguucggcaaccucucccagcucaacuuccucggccucuccgccaugaagcuccagaagcucgaccuccuccccaucgcccaccuccaccucuccuacauccuccucgaccuccgcaacuacuacaucaaggagaacgagaccgagucccuccagauccucaacgccaagacccuccaccucgucuuccaccccaccucccucuucgccauccaggucaacaucuccgucaacacccucggcugccuccagcucaccaacaucaagcucaacgacgacaacugccaggucuucaucaaguuccucuccgagcucacccgcggccccacccuccucaacuucacccucaaccacaucgagaccaccuggaagugccucguccgcgucuuccaguuccucuggcccaagcccgucgaguaccucaacaucuacaaccucaccaucaucgaguccauccgcgaggaggacuucaccuacuccaagaccacccucaaggcccucaccaucgagcacaucaccaaccaggucuuccucuucucccagaccgcccucuacaccgucuucuccgagaugaacaucaugaugcucaccaucuccgacacccccuucauccacaugcucugcccccacgcccccuccaccuucaaguuccucaacuucacccagaacgucuucaccgacuccaucuucgagaagugcuccacccucgucaagcucgagacccucauccuccagaagaacggccucaaggaccucuucaaggucggccucaugaccaaggacaugcccucccucgagauccucgacgucuccuggaacucccucgaguccggccgccacaaggagaacugcaccugggucgaguccaucgucguccucaaccucuccuccaacaugcucaccgacuccgucuuccgcugccuccccccccgcaucaagguccucgaccuccacuccaacaagaucaaguccguccccaagcaggucgucaagcucgaggcccuccaggagcucaacgucgccuucaacucccucaccgaccuccccggcugcggcuccuucuccucccucuccguccucaucaucgaccacaacuccgucucccaccccuccgccgacuucuuccaguccugccagaagaugcgcuccaucaaggccggcgacaaccccuuccagugcaccugcgagcuccgcgaguucgucaagaacaucgaccaggucuccuccgagguccucgagggcuggcccgacuccuacaagugcgacuaccccgaguccuaccgcggcuccccccucaaggacuuccacauguccgagcucuccugcaacaucacccuccucaucgucaccaucggcgccaccaugcucguccucgccgucaccgucaccucccucugcaucuaccucgaccuccccugguaccuccgcauggucugccaguggacccagacccgccgccgcgcccgcaacaucccccucgaggagcuccagcgcaaccuccaguuccacgccuucaucuccuacuccgagcacgacuccgccugggucaaguccgagcucguccccuaccucgagaaggaggacauccagaucugccuccacgagcgcaacuucguccccggcaaguccaucgucgagaacaucaucaacugcaucgagaaguccuacaaguccaucuucguccucucccccaacuucguccaguccgaguggugccacuacgagcucuacuucgcccaccacaaccucuuccacgagggcuccaacaaccucauccucauccuccucgagcccaucccccagaacuccauccccaacaaguaccacaagcucaaggcccucaugaugcagcgcaccuaccuccaguggcccaaggagaaguccaagcgcggccucuucugggccaacauccgcgccgccuucaacaugaagcucacccucgucaccgagaacaacgacgucaaguccuga

SEQ ID NO: 9736 - RNA, 2391 nt, Artificial Sequence
  derived and/or modified sequence opt3 from TLR6__Homo_sapiens__AAY88759
augaccaaggacaaagagcccaucgucaagagcuuccacuuugugugccugaugauuauaaucgugggcacaaggauucaguucuccgaugggaacgaauuugccguggacaaaucuaagagaggacucauccauguaccuaaagaucuuccacugaagacuaagguguuggacaugucacaaaauuacauugcugaguuacaggucagugauaugagcuuccuguccgaacuaacggugcuccggcugucucacaaccgcauccagcuucuggacuugucgguuuuuaaauucaaucaggaucucgaguaucuggaccugucacauaaccaacuccagaagauaagcugucacccgaucgugaguuuucgacauuuagaucuguccuucaaugacuuuaaagcacuucccauuugcaaggaguucgguaacuugucucagcugaauuuucuaggccucagcgccaugaaacugcagaaacuugaucuguugccuaucgcgcaccuccaccuguccuacauuuuacuggaccuccguaacuauuacaucaaggagaaugagaccgaaucacuucaaauacugaacgcuaagacauugcaucuagucuuccacccaacuucccuguuugccauucaggugaauaucagcguaaacacccucgggugucugcagcuuacaaauauuaagcugaacgaugacaauugccagguuuucaucaaauucuugucugagcucaccagaggacccacucuguuaaacuuuacacugaaccauaucgaaaccacguggaagugucuagugagggucuuccaauuucucuggccuaaaccaguggaguaucugaauauuuacaaccuuacuauaaucgaguccauucgggaagaggacuucaccuauucaaagacaacuuugaaagcacugaccaucgaacacauaacaaaucagguguuucucuucagccagaccgcccuguacacggucuuuagugagaugaacauuaugaugcuuacuaucucugauacacccuucauccacaugcugugcccucaugcuccauccaccuuuaaguucuugaauuuuacucaaaacguuuucacagacagcauuuuugaaaaguguucgacccucgugaaacuggagacguuaauccugcagaagaauggccuaaaagaucucuucaagguaggucugaugaccaaagacaugccgucucuugagauuuuggauguguccuggaacucacuggaaagugggcgccacaaggagaauugcacaugggucgaaagcauagugguucucaaccuguccucuaauauguuaacugacagcguguucagaugucugcccccuaggaucaagguccuugauuugcauucaaacaaaauuaagagugugccaaaacagguaguuaagcucgaggcacugcaggaacuaaauguggccuuuaacucccugaccgaccuccccggaugcggcagcuucucuucacugaguguccuuaucaucgaucacaauagcgugucccauccuucugcugacuuuuuccaaucgugucagaaaaugcggagcauuaaggccggcgauaacccauuucagugcacaugcgaguugcgcgaguucgucaagaacauagaccagguguccucagaaguucuggagggguggcccgacaguuacaaaugugauuauccggaaucuuaccgaggaagcccuuuaaaggacuuucacauguccgagcucucaugcaauaucacucugcuuauugugaccaucggugcgacaaugcugguauuggcagucaccgugacuagccucuguauuuaucuggaucuacccugguaccugagaaugguuugccaauggacgcagacaaggcggcgugcccgcaacaucccacucgaagaacugcagagaaaucuucaguuccacgcuuuuauaucuuauuccgagcaugacagugccugggugaaaagcgaauuggucccuuaccuggagaaggaagauauccaaauuuguuuacacgagaggaacuucgugcccggcaaaucuaucguagagaauauuaucaacugcauagaaaaguccuauaagucaauuuuugugcucaguccaaauuucguucagagcgaguggugucauuacgaacuguacuuugcacaccacaaccuuuuccaugaggggucgaauaaccugauccuaauucuccuggaacccaucccucagaauaguauaccaaacaaauaucacaaguugaaagcucugaugaugcagcggaccuacuuacaauggccgaaggagaaaucuaagcgaggacucuucugggccaauauccgcgcggccuuuaacaugaaacugacucuugucaccgagaauaacgacguuaagagcuga

SEQ ID NO: 9737 - RNA, 2391 nt, Artificial Sequence
  derived and/or modified sequence opt4 from TLR6__Homo_sapiens__AAY88759
augaccaaggacaaggagcccaucgugaagagcuuccacuucgugugccugaugaucaucaucgugggcaccagaauccaguucagcgacggcaacgaguucgccguggacaagagcaagagaggccugauccacgugcccaaggaccugccccugaagaccaaggugcuggacaugagccagaacuacaucgccgagcugcaggugagcgacaugagcuuccugagcgagcugaccgugcugagacugagccacaacagaauccagcugcuggaccugagcguguucaaguucaaccaggaccuggaguaccuggaccugagccacaaccagcugcagaagaucagcugccaccccaucgugagcuucagacaccuggaccugagcuucaacgacuucaaggcccugcccaucugcaaggaguucggcaaccugagccagcugaacuuccugggccugagcgccaugaagcugcagaagcuggaccugcugcccaucgcccaccugcaccugagcuacauccugcuggaccugagaaacuacuacaucaaggagaacgagaccgagagccugcagauccugaacgccaagacccugcaccugguguuccaccccaccagccuguucgccauccaggugaacaucagcgugaacacccugggcugccugcagcugaccaacaucaagcugaacgacgacaacugccagguguucaucaaguuccugagcgagcugaccagaggccccacccugcugaacuucacccugaaccacaucgagaccaccuggaagugccuggugagaguguuccaguuccuguggcccaagcccguggaguaccugaacaucuacaaccugaccaucaucgagagcaucagagaggaggacuucaccuacagcaagaccacccugaaggcccugaccaucgagcacaucaccaaccagguguuccuguucagccagaccgcccuguacaccguguucagcgagaugaacaucaugaugcugaccaucagcgacacccccuucauccacaugcugugcccccacgcccccagcaccuucaaguuccugaacuucacccagaacguguucaccgacagcaucuucgagaagugcagcacccuggugaagcuggagacccugauccugcagaagaacggccugaaggaccuguucaaggugggccugaugaccaaggacaugcccagccuggagauccuggacgugagcuggaacagccuggagagcggcagacacaaggagaacugcaccuggguggagagcaucguggugcugaaccugagcagcaacaugcugaccgacagcguguucagaugccugccccccagaaucaaggugcuggaccugcacagcaacaagaucaagagcgugcccaagcagguggugaagcuggaggcccugcaggagcugaacguggccuucaacagccugaccgaccugcccggcugcggcagcuucagcagccugagcgugcugaucaucgaccacaacagcgugagccaccccagcgccgacuucuuccagagcugccagaagaugagaagcaucaaggccggcgacaaccccuuccagugcaccugcgagcugagagaguucgugaagaacaucgaccaggugagcagcgaggugcuggagggcuggcccgacagcuacaagugcgacuaccccgagagcuacagaggcagcccccugaaggacuuccacaugagcgagcugagcugcaacaucacccugcugaucgugaccaucggcgccaccaugcuggugcuggccgugaccgugaccagccugugcaucuaccuggaccugcccugguaccugagaauggugugccaguggacccagaccagaagaagagccagaaacaucccccuggaggagcugcagagaaaccugcaguuccacgccuucaucagcuacagcgagcacgacagcgccugggugaagagcgagcuggugcccuaccuggagaaggaggacauccagaucugccugcacgagagaaacuucgugcccggcaagagcaucguggagaacaucaucaacugcaucgagaagagcuacaagagcaucuucgugcugagccccaacuucgugcagagcgaguggugccacuacgagcuguacuucgcccaccacaaccuguuccacgagggcagcaacaaccugauccugauccugcuggagcccaucccccagaacagcauccccaacaaguaccacaagcugaaggcccugaugaugcagagaaccuaccugcaguggcccaaggagaagagcaagagaggccuguucugggccaacaucagagccgccuucaacaugaagcugacccuggugaccgagaacaacgacgugaagagcuga

SEQ ID NO: 9738 - RNA, 2391 nt, Artificial Sequence
  derived and/or modified sequence opt5 from TLR6__Homo_sapiens__AAY88759
augaccaaggacaaagagcccaucgugaaguccuuccacuuugucugccugaugauuaucauuguuggcacaagaauccaguucuccgaugggaacgaauuugccguggacaaaucuaagcggggacucauucaugugccuaaagaucugccgcuuaagacgaagguccuggacaugagccaaaauuacaucgcugagcuccagguguccgauaugucuuuccugagcgaacuuaccguucugcgccucucccacaacagaauccagcugcuggaccucucuguguuuaaauucaaucaggaucuggaguaucuugaccugagccauaaccaacuccagaagauuuccugucaccccaucgucagcuuucggcaucuggaucuuucuuucaaugacuuuaaagcccugccuauuugcaaggaguucggcaaccucucccagcugaauuuucuggggcucagcgcgaugaaacugcagaagcucgaucugcuccccaucgcucaucugcaccuuucuuacauucugcucgaccugcgcaacuauuacaucaaggagaaugagacagaaucccugcaaauucucaacgccaaaacccugcaccuuguguuccacccuacaagccuguuugccauccagguuaauaucucugugaacacccucggaugucugcagcuuacaaauauuaagcugaacgaugacaauugccaggucuucaucaaauuccucuccgagcugaccagaggccccacgcugcucaacuuuacccugaaccauauugaaacaaccuggaagugucuugugcggguguuccaauuucuguggccuaaaccggucgaguaucucaauaucuacaaccugacaauuaucgagagcauccgcgaagaggacuucaccuauuccaagacgacacugaaagcucuuaccauugaacacaucacaaaucagguuuuucucuucucucagaccgcccuguacaccguguuuagcgagaugaacauuaugaugcugacaaucuccgauacgcccuucauucacaugcucugcccucaugcucccagcaccuuuaaguuccugaauuuuacacaaaacguguucaccgacucuaucuuugaaaaguguuccacacuugucaaacuggagacccucauccugcagaagaaugggcugaaagaucuuuucaaggugggacucaugacgaaagacaugccuagccuggagauucuggauguuucuuggaacagccucgaauccggcagacacaaggagaauugcacauggguggaaucuaucgucgugcugaaccuuagcuccaauaugcugaccgacagcguuuuccggugucuucccccgcgcauuaaggugcuggaucugcauucuaacaaaaucaaguccgucccuaaacagguggucaaacuugaggcccuccaggaacugaauguggcguuuaacagccugaccgaccuccccggcugcgggucuuucuccagccuguccguucuuauuaucgaucacaauucugugagccauccuuccgccgacuuuuuccaaucuugucagaagaugagaagcauuaaggcuggagauaaccccuuucagugcacaugcgagcugcgggaguucgucaagaacaucgaccagguguccagcgaaguucucgagggcuggcccgacucuuacaaaugugauuauccugaauccuaccgcgggagcccgcugaaggacuuucacaugucugagcuguccugcaauaucacccuucucauugugacaaucggagccacgaugcugguccuggcugugaccgugacaagccucuguauuuaucuggaucuucccugguaccugagaaugguuugccaauggacccagacacggcgcagagcccggaacaucccucucgaagaacugcagagaaaucugcaguuccacgcguuuauuucuuauagcgagcaugacuccgccugggucaaaagcgaacuugugcccuaccuggagaaggaagauauccaaaucugucuccacgagcgcaacuucgugccuggcaaaucuauugucgagaauaucauuaacugcaucgaaaaguccuauaagagcauuuuugugcugucccccaauuucguucagucugaguggugucauuacgaacucuacuuugcucaccacaaccuguuccaugaggggagcaauaaccuuauccugauccuccuggaaccgauuccucagaauagcauccccaacaaauaucacaagcugaaagcccuuaugaugcagcggaccuaccugcaauggccuaaggagaaaucuaagagaggacucuucugggcuaauauucgcgccgccuuuaacaugaaacugacgcucgugaccgagaauaacgacgucaagagcuga

SEQ ID NO: 9739 - protein, 796 aa, Artificial Sequence [sequence omitted]

SEQ ID NO: 9740 - RNA, 2391 nt, Artificial Sequence
  TLR6__Homo_sapiens__AAY88760
augaccaaagacaaagaaccuauuguuaaaagcuuccauuuuguuugccuuaugaucauaauaguuggaaccagaauccaguucuccgacggaaaugaauuugcaguagacaagucaaaaagaggucuuauucauguuccaaaagaccuaccgcugaaaaccaaagucuuagauaugucucagaacuacaucgcugagcuucaggucucugacaugagcuuucuaucagaguugacaguuuugagacuuucccauaacagaauccagcuacuugauuuaaguguuuucaaguucaaccaggauuuagaauauuuggauuuaucucauaaucaguugcaaaagauauccugccauccuauugugaguuucaggcauuuagaucucucauucaaugauuucaaggcccugcccaucuguaaggaauuuggcaacuuaucacaacugaauuucuugggauugagugcuaugaagcugcaaaaauuagauuugcugccaauugcucacuugcaucuaaguuauauccuucuggauuuaagaaauuauuauauaaaagaaaaugagacagaaagucuacaaauucugaaugcaaaaacccuucaccuuguuuuucacccaacuaguuuauucgcuauccaagugaacauaucaguuaauacuuuagggugcuuacaacugacuaauauuaaauugaaugaugacaacugucaaguuuucauuaaauuuuuaucagaacucaccagagguucaaccuuacugaauuuuacccucaaccacauagaaacgacuuggaaaugccuggucagagucuuucaauuucuuuggcccaaaccuguggaauaucucaauauuuacaauuuaacaauaauugaaagcauucgugaagaagauuuuacuuauucuaaaacgacauugaaagcauugacaauagaacauaucacgaaccaaguuuuucuguuuucacagacagcuuuguacaccguguuuucugagaugaacauuaugauguuaaccauuucagauacaccuuuuauacacaugcuguguccucaugcaccaagcacauucaaguuuuugaacuuuacccagaacguuuucacagauaguauuuuugaaaaauguuccacguuaguuaaauuggagacacuuaucuuacaaaagaauggauuaaaagaccuuuucaaaguaggucucaugacgaaggauaugccuucuuuggaaauacuggauguuagcuggaauucuuuggaaucugguagacauaaagaaaacugcacuuggguugagaguauagugguguuaaauuugucuucaaauaugcuuacugacucuguuuucagauguuuaccucccaggaucaagguacuugaucuucacagcaauaaaauaaagagcauuccuaaacaagucguaaaacuggaagcuuugcaagaacucaauguugcuuucaauucuuuaacugaccuuccuggauguggcagcuuuagcagccuuucuguauugaucauugaucacaauucaguuucccacccaucggcugauuucuuccagagcugccagaagaugaggucaauaaaagcaggggacaauccauuccaauguaccugugagcuaagagaauuugucaaaaauauagaccaaguaucaagugaaguguuagagggcuggccugauucuuauaagugugacuacccagaaaguuauagaggaagcccacuaaaggacuuucacaugucugaauuauccugcaacauaacucugcugaucgucaccaucggugccaccaugcugguguuggcugugacugugaccucccucugcaucuacuuggaucugcccugguaucucaggauggugugccaguggacccagacucggcgcagggccaggaacauacccuuagaagaacuccaaagaaaccuccaguuucaugcuuuuauuucauauagugaacaugauucugccugggugaaaagugaauugguaccuuaccuagaaaaagaagauauacagauuugucuucaugagagaaacuuugucccuggcaagagcauuguggaaaauaucaucaacugcauugagaagaguuacaaguccaucuuuguuuugucucccaacuuuguccagagugaguggugccauuacgaacucuauuuugcccaucacaaucucuuucaugaaggaucuaauaacuuaauccucaucuuacuggaacccauuccacagaacagcauucccaacaaguaccacaagcugaaggcucucaugaugcagcggacuuauuugcaguggcccaaggagaaaagcaaacgugggcucuuuugggcuaacauuagagccgcuuuuaauaugaaauuaacacuagucacugaaaacaaugaugugaaaucuuaa

SEQ ID NO: 9741 - RNA, 2391 nt, Artificial Sequence
  derived and/or modified sequence opt1 from TLR6__Homo_sapiens__AAY88760
augaccaaggacaaggagcccaucgucaagagcuuccacuucgugugccugaugaucaucaucgugggcacccgcauccaguucuccgacgggaacgaguucgccguggacaagagcaagcggggccucauccacgucccgaaggaccugccccugaagacgaaggugcucgacaugucccagaacuacaucgccgagcuccaggugagcgacauguccuuccugagcgagcugaccguccugcgccugucccacaaccggauccagcuccuggaccugagcguguucaaguucaaccaggaccucgaguaccuggaccugucccacaaccagcuccagaagaucagcugccaccccaucguguccuuccgccaccuggaccugagcuucaacgacuucaaggcgcuccccaucugcaaggaguucgggaaccugucccagcugaacuuccucggccugagcgccaugaagcugcagaagcucgaccugcugccgaucgcccaccuccaccuguccuacauccugcucgaccugcggaacuacuacaucaaggagaacgagaccgagagccugcagauccucaacgccaagacccugcaccuggucuuccaccccacgucccucuucgccauccaggugaacaucagcgugaacacccuggggugccugcagcucaccaacaucaagcugaacgacgacaacugccaggucuucaucaaguuccuguccgagcucacccgcggcagcacgcugcugaacuucacccucaaccacaucgagaccaccuggaagugccuggugcggguguuccaguuccuguggcccaagcccgucgaguaccucaacaucuacaaccugacgaucaucgagagcauccgcgaggaggacuucaccuacuccaagaccacccugaaggcgcugacgaucgagcacaucaccaaccagguguuccucuucagccagaccgcccuguacaccguguucuccgagaugaacaucaugaugcugacgaucagcgacaccccguucauccacaugcucugcccccacgcccccuccaccuucaaguuccugaacuucacccagaacgucuucacggacagcaucuucgagaagugcuccacccuggugaagcucgagacccugauccugcagaagaacggccucaaggaccuguucaagguggggcugaugaccaaggacaugcccagccucgagauccuggacgucuccuggaacagccuggaguccggccggcacaaggagaacugcacguggguggagagcaucgugguccucaaccuguccagcaacaugcugaccgacuccguguuccgcugccucccgccccggaucaagguccuggaccugcacagcaacaagaucaaguccauccccaagcaggucgugaagcucgaggcccugcaggagcugaacguggcguucaacagccucaccgaccugcccgggugcggcuccuucagcagccuguccgugcucaucaucgaccacaacagcgugucccacccgagcgccgacuucuuccaguccugccagaagaugcgcagcaucaaggccggggacaaccccuuccagugcacgugcgagcugcgggaguucgucaagaacaucgaccagguguccagcgaggugcuggagggcuggcccgacuccuacaagugcgacuaccccgagagcuaccgcggcuccccgcucaaggacuuccacaugagcgagcuguccugcaacaucacccugcucaucgucaccaucggggccaccaugcuggugcuggccgugaccgucacgagccucugcaucuaccuggaccugcccugguaccuccggauggugugccaguggacccagacccgccggcgcgcgcggaacaucccccuggaggagcugcagcgcaaccuccaguuccacgccuucaucuccuacagcgagcacgacuccgccugggucaagagcgagcuggugcccuaccuggagaaggaggacauccagaucugccuccacgagcggaacuucgugccgggcaagagcaucguggagaacaucaucaacugcaucgagaaguccuacaagagcaucuucguccugucccccaacuucgugcagagcgaguggugccacuacgagcuguacuucgcccaccacaaccucuuccacgagggguccaacaaccugauccugauccuccuggagcccaucccccagaacagcaucccgaacaaguaccacaagcugaaggcccucaugaugcagcgcaccuaccugcaguggcccaaggagaaguccaagcgcggccuguucugggcgaacauccgggccgccuucaacaugaagcucacccuggugacggagaacaacgacgucaagagcuga

SEQ ID NO: 9742 - RNA, 2391 nt, Artificial Sequence
  derived and/or modified sequence opt2 from TLR6__Homo_sapiens__AAY88760
augaccaaggacaaggagcccaucgucaaguccuuccacuucgucugccucaugaucaucaucgucggcacccgcauccaguucuccgacggcaacgaguucgccgucgacaaguccaagcgcggccucauccacguccccaaggaccucccccucaagaccaagguccucgacaugucccagaacuacaucgccgagcuccaggucuccgacauguccuuccucuccgagcucaccguccuccgccucucccacaaccgcauccagcuccucgaccucuccgucuucaaguucaaccaggaccucgaguaccucgaccucucccacaaccagcuccagaagaucuccugccaccccaucgucuccuuccgccaccucgaccucuccuucaacgacuucaaggcccuccccaucugcaaggaguucggcaaccucucccagcucaacuuccucggccucuccgccaugaagcuccagaagcucgaccuccuccccaucgcccaccuccaccucuccuacauccuccucgaccuccgcaacuacuacaucaaggagaacgagaccgagucccuccagauccucaacgccaagacccuccaccucgucuuccaccccaccucccucuucgccauccaggucaacaucuccgucaacacccucggcugccuccagcucaccaacaucaagcucaacgacgacaacugccaggucuucaucaaguuccucuccgagcucacccgcggcuccacccuccucaacuucacccucaaccacaucgagaccaccuggaagugccucguccgcgucuuccaguuccucuggcccaagcccgucgaguaccucaacaucuacaaccucaccaucaucgaguccauccgcgaggaggacuucaccuacuccaagaccacccucaaggcccucaccaucgagcacaucaccaaccaggucuuccucuucucccagaccgcccucuacaccgucuucuccgagaugaacaucaugaugcucaccaucuccgacacccccuucauccacaugcucugcccccacgcccccuccaccuucaaguuccucaacuucacccagaacgucuucaccgacuccaucuucgagaagugcuccacccucgucaagcucgagacccucauccuccagaagaacggccucaaggaccucuucaaggucggccucaugaccaaggacaugcccucccucgagauccucgacgucuccuggaacucccucgaguccggccgccacaaggagaacugcaccugggucgaguccaucgucguccucaaccucuccuccaacaugcucaccgacuccgucuuccgcugccuccccccccgcaucaagguccucgaccuccacuccaacaagaucaaguccauccccaagcaggucgucaagcucgaggcccuccaggagcucaacgucgccuucaacucccucaccgaccuccccggcugcggcuccuucuccucccucuccguccucaucaucgaccacaacuccgucucccaccccuccgccgacuucuuccaguccugccagaagaugcgcuccaucaaggccggcgacaaccccuuccagugcaccugcgagcuccgcgaguucgucaagaacaucgaccaggucuccuccgagguccucgagggcuggcccgacuccuacaagugcgacuaccccgaguccuaccgcggcuccccccucaaggacuuccacauguccgagcucuccugcaacaucacccuccucaucgucaccaucggcgccaccaugcucguccucgccgucaccgucaccucccucugcaucuaccucgaccuccccugguaccuccgcauggucugccaguggacccagacccgccgccgcgcccgcaacaucccccucgaggagcuccagcgcaaccuccaguuccacgccuucaucuccuacuccgagcacgacuccgccugggucaaguccgagcucguccccuaccucgagaaggaggacauccagaucugccuccacgagcgcaacuucguccccggcaaguccaucgucgagaacaucaucaacugcaucgagaaguccuacaaguccaucuucguccucucccccaacuucguccaguccgaguggugccacuacgagcucuacuucgcccaccacaaccucuuccacgagggcuccaacaaccucauccucauccuccucgagcccaucccccagaacuccauccccaacaaguaccacaagcucaaggcccucaugaugcagcgcaccuaccuccaguggcccaaggagaaguccaagcgcggccucuucugggccaacauccgcgccgccuucaacaugaagcucacccucgucaccgagaacaacgacgucaaguccuga

SEQ ID NO: 9743 - RNA, 2391 nt, Artificial Sequence
  derived and/or modified sequence opt3 from TLR6__Homo_sapiens__AAY88760
augaccaaggacaaagagcccaucgucaagagcuuccacuuugugugccugaugauuauaaucguuggcacaaggauucaguucuccgaugggaacgaauuugccguggacaaaucuaagagaggacucauccauguaccuaaagaucuuccacugaagacuaagguguuggacaugucacaaaauuacauugcugaguuacaggucagugauaugagcuuccuguccgaacuaacggugcuccggcugucucacaaccgcauccagcuucuggacuugucgguuuuuaaauucaaucaggaucucgaguaucuggaccugucacauaaccaacuccagaagauaagcugucacccgaucgugaguuuucgacauuuagaucuguccuucaaugacuuuaaagcacuucccauuugcaaggaguucgguaacuugucucagcugaauuuucuaggccucagcgccaugaaacugcagaaacuugaucuguugccuaucgcgcaccuccaccuguccuacauuuuacuggaccuccguaacuauuacaucaaggagaaugagaccgaaucacuucaaauacugaacgcuaagacauugcaucuagucuuccacccaacuucucuguuugccauucaggugaauaucagcguaaacacccucgggugucugcagcuuacaaauauuaagcugaacgaugacaauugccagguuuucaucaaauucuugucugagcucaccagaggauccacucuguuaaacuuuacacugaaccauaucgaaaccacguggaagugucuagugagggucuuccaauuucucuggcccaaaccuguggaguaucugaauauuuacaaccuuacuauaaucgagucaauucgggaagaggacuucaccuauagcaagacaacuuugaaagcacugaccaucgaacacauaacaaaucagguguuucucuucagucagaccgcccuguacacggucuuuucugagaugaacauuaugaugcuuacuaucuccgauacaccauucauccacaugcugugcccccaugcuccuagcaccuuuaaguucuugaauuuuacucaaaacguuuucacagacucgauuuuugaaaaguguucuacccucgugaaacuggagacguuaauccugcagaagaauggccuaaaagaucucuucaagguaggucugaugaccaaagacaugccaucccuugagauuuuggaugugucauggaacagucuggaaagcgggcgccacaaggagaauugcacaugggucgaauccauagugguucucaaccugucuagcaauauguuaacugacucaguguucagaugucugccgcccaggaucaagguccuugauuugcauaguaacaaaauuaaguccaucccuaaacaggugguaaagcucgaggcacugcaggaacuaaauguugccuuuaacagccugaccgaccucccaggaugcggcucuuucucaagucugagcgugcuuaucauugaucacaauuccgucucucaucccucggcugacuuuuuccaaagcugucagaaaaugcgguccauaaaggccggcgauaacccuuuucagugcacaugcgaguugcgcgaguucgugaagaacaucgaccaggucucaagugaagugcuggagggguggccagacucuuacaaaugugauuaucccgaaagcuaccgaggauccccguuaaaggacuuucacaugucagagcucagcugcaauauuacucugcuuaucguuaccauuggugcgacaaugcugguguuggcaguaaccgucacuucucucuguaucuaucuggaucuaccuugguaccugagaauggugugccaauggacgcagacaaggcggcgugcccgcaacauaccccucgaagaacugcagagaaaucuucaguuccacgcuuuuaucuccuauagugagcaugacagcgccuggguuaaaucugaauuggugccauaccuggagaaggaagauauucaaaucuguuuacacgagaggaacuucgucccuggcaaauccauuguggagaauaucauaaacugcauugaaaagucauauaagaguaucuuuguacucagccccaauuucgugcagucggaguggugucauuacgaacuguacuuugcacaccacaaccuuuuccaugagggguccaauaaccugauucuaauccuccuggaaccaauaccccagaauaguaucccuaacaaauaucacaaguugaaagcucugaugaugcagcggaccuacuuacaauggccaaaggagaaaagcaagcgaggacucuucugggccaauauucgcgcggccuuuaacaugaaacugacucuuguuaccgagaauaacgacgucaagucauga

SEQ ID NO: 9744 - RNA, 2391 nt, Artificial Sequence
  derived and/or modified sequence opt4 from TLR6__Homo_sapiens__AAY88760
augaccaaggacaaggagcccaucgugaagagcuuccacuucgugugccugaugaucaucaucgugggcaccagaauccaguucagcgacggcaacgaguucgccguggacaagagcaagagaggccugauccacgugcccaaggaccugccccugaagaccaaggugcuggacaugagccagaacuacaucgccgagcugcaggugagcgacaugagcuuccugagcgagcugaccgugcugagacugagccacaacagaauccagcugcuggaccugagcguguucaaguucaaccaggaccuggaguaccuggaccugagccacaaccagcugcagaagaucagcugccaccccaucgugagcuucagacaccuggaccugagcuucaacgacuucaaggcccugcccaucugcaaggaguucggcaaccugagccagcugaacuuccugggccugagcgccaugaagcugcagaagcuggaccugcugcccaucgcccaccugcaccugagcuacauccugcuggaccugagaaacuacuacaucaaggagaacgagaccgagagccugcagauccugaacgccaagacccugcaccugguguuccaccccaccagccuguucgccauccaggugaacaucagcgugaacacccugggcugccugcagcugaccaacaucaagcugaacgacgacaacugccagguguucaucaaguuccugagcgagcugaccagaggcagcacccugcugaacuucacccugaaccacaucgagaccaccuggaagugccuggugagaguguuccaguuccuguggcccaagcccguggaguaccugaacaucuacaaccugaccaucaucgagagcaucagagaggaggacuucaccuacagcaagaccacccugaaggcccugaccaucgagcacaucaccaaccagguguuccuguucagccagaccgcccuguacaccguguucagcgagaugaacaucaugaugcugaccaucagcgacacccccuucauccacaugcugugcccccacgcccccagcaccuucaaguuccugaacuucacccagaacguguucaccgacagcaucuucgagaagugcagcacccuggugaagcuggagacccugauccugcagaagaacggccugaaggaccuguucaaggugggccugaugaccaaggacaugcccagccuggagauccuggacgugagcuggaacagccuggagagcggcagacacaaggagaacugcaccuggguggagagcaucguggugcugaaccugagcagcaacaugcugaccgacagcguguucagaugccugccccccagaaucaaggugcuggaccugcacagcaacaagaucaagagcauccccaagcagguggugaagcuggaggcccugcaggagcugaacguggccuucaacagccugaccgaccugcccggcugcggcagcuucagcagccugagcgugcugaucaucgaccacaacagcgugagccaccccagcgccgacuucuuccagagcugccagaagaugagaagcaucaaggccggcgacaaccccuuccagugcaccugcgagcugagagaguucgugaagaacaucgaccaggugagcagcgaggugcuggagggcuggcccgacagcuacaagugcgacuaccccgagagcuacagaggcagcccccugaaggacuuccacaugagcgagcugagcugcaacaucacccugcugaucgugaccaucggcgccaccaugcuggugcuggccgugaccgugaccagccugugcaucuaccuggaccugcccugguaccugagaauggugugccaguggacccagaccagaagaagagccagaaacaucccccuggaggagcugcagagaaaccugcaguuccacgccuucaucagcuacagcgagcacgacagcgccugggugaagagcgagcuggugcccuaccuggagaaggaggacauccagaucugccugcacgagagaaacuucgugcccggcaagagcaucguggagaacaucaucaacugcaucgagaagagcuacaagagcaucuucgugcugagccccaacuucgugcagagcgaguggugccacuacgagcuguacuucgcccaccacaaccuguuccacgagggcagcaacaaccugauccugauccugcuggagcccaucccccagaacagcauccccaacaaguaccacaagcugaaggcccugaugaugcagagaaccuaccugcaguggcccaaggagaagagcaagagaggccuguucugggccaacaucagagccgccuucaacaugaagcugacccuggugaccgagaacaacgacgugaagagcuga

SEQ ID NO: 9745 - RNA, 2391 nt, Artificial Sequence
  derived and/or modified sequence opt5 from TLR6__Homo_sapiens__AAY88760
augaccaaggacaaagagcccaucgugaagucuuuccacuuugucugccugaugauuaucauuguuggcacaagaauccaguucuccgaugggaacgaauuugccguggacaaaucuaagcggggacucauucaugugccuaaagaucugccgcuuaagacgaagguccuggacaugagccaaaauuacaucgcugagcuccagguguccgauaugucuuuccugagcgaacuuaccguucugcgccucucccacaacagaauccagcugcuggaccucucuguguuuaaauucaaucaggaucuggaguaucuugaccugagccauaaccaacuccagaagauuuccugucaccccaucgucagcuuucggcaucuggaucuuucuuucaaugacuuuaaagcccugccuauuugcaaggaguucggcaaccucucccagcugaauuuucuggggcucagcgcgaugaaacugcagaagcuggaucugcuccccaucgcucaccuucaccuuucuuacauucugcucgaccugcgcaacuauuacaucaaggagaaugagacagaaucccugcaaauucucaacgccaaaacccugcaucuuguguuccacccuacaagccuguuugccauccagguuaauaucucugugaacacccucggaugucugcagcuuacaaauauuaagcugaacgaugacaauugccaggucuucaucaaauuccucuccgagcugaccagaggcagcacgcugcucaacuuuacccugaaccauauugaaacaaccuggaagugucuugugcggguguuccaauuucuguggcccaaaccugucgaguaucucaauaucuacaaccugacaauuaucgaguccauccgcgaagaggacuucaccuauucuaagacgacacugaaagcucuuaccauugaacacaucacaaaucagguuuuucucuucagccagaccgcccuguacaccguguuuuccgagaugaacauuaugaugcugacaaucagcgauacgccguucauucacaugcucugcccccaugcuccuucuaccuuuaaguuccugaauuuuacacaaaacguguucaccgacuccaucuuugaaaaguguagcacacuugucaaacuggagacccucauccugcagaagaaugggcugaaagaucuuuucaaggugggacucaugacgaaagacaugcccucucuggagauucuggauguuagcuggaacucccucgaaucuggcagacacaaggagaauugcacauggguggaaagcaucgucgugcugaaccuuuccagcaauaugcugaccgacucuguuuuccggugucucccuccccgcauuaaggugcuggaucugcauuccaacaaaaucaagagcauuccgaaacaggucgugaaacuugaggcccuccaggaacugaaugucgcguuuaacucucugaccgaccucccuggcugcggguccuucagcucccugucugugcuuaucauugaucacaauagcguuucccaucccucugccgacuuuuuccaaagcugucagaagaugagauccaucaaggcuggagauaacccuuuucagugcacaugcgagcugcgggaguucgugaagaacaucgaccaggucagcucugaagugcucgagggcuggcccgacuccuacaaaugugauuaucccgaaagcuaccgcgggucuccucugaaggacuuucacauguccgagcugagcugcaauauuacccuucucaucguuacaauuggagccacgaugcuggugcuggcugucaccgugacaucucucuguaucuaucuggaucuuccgugguaccugagaauggugugccaauggacccagacacggcgcagagcccggaacauuccccucgaagaacugcagagaaaucugcaguuccacgcguuuaucagcuauuccgagcaugacagcgccuggguuaaaucugaacuugucccuuaccuggagaaggaagauauccaaauuugucuccacgagcgcaacuucgugcccggcaaauccaucguggagaauauuaucaacugcauugaaaagagcuauaaguccaucuuuguccugucuccuaauuucgugcagagcgaguggugucauuacgaacucuacuuugcucaccacaaccuguuccaugagggguccaauaaccuuauccugauucuccuggaacccaucccgcagaauagcauuccuaacaaauaucacaagcugaaagcccuuaugaugcagcggaccuaccugcaauggcccaaggagaaaagcaagagaggacucuucugggcuaauauccgcgccgccuuuaacaugaaacugacgcucguuaccgagaauaacgacgugaaguccuga

SEQ ID NO: 9746 - protein, 796 aa, Artificial Sequence [sequence omitted]

SEQ ID NO: 9747 - RNA, 2391 nt, Artificial Sequence
  TLR6__Homo_sapiens__AAY88761
augaccaaagacaaagaaccuauuguuaaaagcuuccauuuuguuugccuuaugaucauaauaguuggaaccagaauccaguucuccgacggaaaugaauuugcaguagacaagucaaaaagaggucuuauucauguuccaaaagaccuaccgcugaaaaccaaagucuuagauaugucucagaacuacaucgcugagcuucaggucucugacaugagcuuucuaucagaguugacaguuuugagacuuucccauaacagaauccagcuacuugauuuaaguguuuucaaguucaaccaggauuuagaauauuuggauuuaucucauaaucaguugcaaaagauauccugccauccuauugugaguuucaggcauuuagaucucucauucaaugauuucaaggcccugcccaucuguaaggaauuuggcaacuuaucacaacugaauuucuugggauugagugcuaugaagcugcaaaaauuagauuugcugccaauugcucacuugcaucuaaguuauauccuucuggauuuaagaaauuauuauauaaaagaaaaugagacagaaagucuacaaauucugaaugcaaaaacccuucaccuuguuuuucacccaacuaguuuauucgcuauccaagugaacauaucaguuaauacuuuagggugcuuacaacugacuaauauuaaauugaaugaugacaacugucaaguuuucauuaaauuuuuaucagaacucaccagagguccaaccuuacugaauuuuacccucaaccacauagaaacgacuuggaaaugccuggucagagucuuucaauuucuuuggcccaaaccuguggaauaucucaauauuuacaauuuaacaauaauugaaagcauucgugaagaagauuuuacuuauucuaaaacgacauugaaagcauugacaauagaacauaucacgaaccaaguuuuucuguuuucacagacagcuuuguacaccauguuuucugagaugaacauuaugauguuaaccauuucagauacaccuuuuauacacaugcuguguccucaugcaccaagcacauucaaguuuuugaacuuuacgcagaacguuuucacagauaguauuuuugaaaaauguuccacguuaguuaaauuggagacacuuaucuuacaaaagaauggauuaaaagaccuuuucaaaguaggucucaugacgaaggauaugccuucuuuggaaauacuggauguuagcuggaauucuuuggaaucugguagacauaaggaaaacugcacuuggguugagaguauagugguguuaaauuugucuucaaauaugcuuacugacucuguuuucagauguuuaccucccaggaucaagguacuugaucuucacagcaauaaaauaaagagcauuccuaaacaagucguaaaacuggaagcuuugcaagaacucaauguugcuuucaauucuuuaacugaccuuccuggauguggcagcuuuagcagccuuucuguauugaucauugaucacaauucaguuucccacccaucggcugauuucuuccagagcugccagaagaugaggucaauaaaagcaggggacaauccauuccaauguaccugugagcuaagagaauuugucaaaaauauagaccaaguaucaagugaaguguuagagggcuggccugauucuuauaagugugacuacccagaaaguuauagaggaagcccacuaaaggacuuucacaugucugaauuauccugcaacauaacucugcugaucgucaccaucggugccaccaugcugguguuggcugugacugugaccucccucugcaucuacuuggaucugcccugguaucucaggauggugugccaguggacccagacucggcgcagggccaggaacauacccuuagaagaacuccaaagaaaccuccaguuucaugcuuuuauuucauauagugaacaugauucugccugggugaaaagugaauugguaccuuaccuagaaaaagaagauauacagauuugucuucaugagagaaacuuugucccuggcaagagcauuguggaaaauaucaucaacugcauugagaagaguuacaaguccaucuuuguuuugucucccaacuuuguccagagugaguggugccauuacgaacucuauuuugcccaucacaaucucuuucaugaaggaucuaauaacuuaauccucaucuuacuggaacccauuccacagaacagcauucccaacaaguaccacaagcugaaggcucucaugaugcagcggacuuauuugcaguggcccaaggagaaaagcaaacgugggcucuuuugggcuaacauuagagccgcuuuuaauaugaaauuaacacuagucacugaaaacaaugaugugaaaucuuaa

SEQ ID NO: 9748 - RNA, 2391 nt, Artificial Sequence
  derived and/or modified sequence opt1 from TLR6__Homo_sapiens__AAY88761
augaccaaggacaaggagcccaucgucaagagcuuccacuucgugugccugaugaucaucaucgugggcacccgcauccaguucagcgacgggaacgaguucgccguggacaagagcaagcggggccucauccacgucccgaaggaccugccccugaagacgaaggugcucgacaugucccagaacuacaucgccgagcuccaggugagcgacauguccuuccugagcgagcugaccguccugcgccugucccacaaccggauccagcuccuggaccugagcguguucaaguucaaccaggaccucgaguaccuggaccugucccacaaccagcuccagaagaucagcugccaccccaucguguccuuccgccaccuggaccugagcuucaacgacuucaaggcgcuccccaucugcaaggaguucgggaaccugucccagcugaacuuccucggccugagcgccaugaagcugcagaagcucgaccugcugccgaucgcccaccuccaccuguccuacauccugcucgaccugcggaacuacuacaucaaggagaacgagaccgagagccugcagauccucaacgccaagacccugcaccuggucuuccaccccacgucccucuucgccauccaggugaacaucagcgugaacacccuggggugccugcagcucaccaacaucaagcugaacgacgacaacugccaggucuucaucaaguuccuguccgagcucacccgcggccccacgcugcugaacuucacccucaaccacaucgagaccaccuggaagugccuggugcggguguuccaguuccuguggcccaagccggucgaguaccucaacaucuacaaccugacgaucaucgagagcauccgcgaggaggacuucaccuacagcaagaccacccugaaggcgcugacgaucgagcacaucaccaaccagguguuccucuucucccagaccgcccuguacaccauguucagcgagaugaacaucaugaugcugacgaucuccgacacccccuucauccacaugcucugcccccacgcccccagcaccuucaaguuccugaacuucacccagaacguguucacggacuccaucuucgagaagugcagcacccuggucaagcucgagacccugauccugcagaagaacggccucaaggaccuguucaagguggggcugaugaccaaggacaugccgucccucgagauccuggacgugagcuggaacucccuggagagcggccggcacaaggagaacugcacgugggucgaguccaucguggugcucaaccugagcuccaacaugcugaccgacagcgucuuccgcugccucccgccccggaucaaggugcuggaccugcacuccaacaagaucaagagcauccccaagcaggucgugaagcucgaggcccugcaggagcugaacguggcguucaacucccucaccgaccugcccgggugcggcagcuucuccagccugagcguccucaucaucgaccacaacuccgugagccaccccuccgccgacuucuuccagagcugccagaagaugcgcuccaucaaggccggggacaaccccuuccagugcacgugcgagcugcgggaguucgugaagaacaucgaccaggucagcuccgaggugcuggagggcuggcccgacagcuacaagugcgacuacccggaguccuaccgcggcagcccccucaaggacuuccacauguccgagcugagcugcaacaucacccugcucaucgugaccaucggggccaccaugcugguccuggccgugaccgugacgucccucugcaucuaccuggaccugcccugguaccuccggauggucugccaguggacccagacccgccggcgcgcgcggaacaucccccuggaggagcugcagcgcaaccuccaguuccacgccuucaucagcuacuccgagcacgacagcgccugggugaaguccgagcuggugccguaccuggagaaggaggacauccagaucugccuccacgagcggaacuucguccccggcaagagcaucguggagaacaucaucaacugcaucgagaaguccuacaagagcaucuucgugcugagccccaacuucguccaguccgaguggugccacuacgagcuguacuucgcccaccacaaccucuuccacgaggggagcaacaaccugauccugauccuccuggagcccaucccgcagaacuccauccccaacaaguaccacaagcugaaggcccucaugaugcagcgcaccuaccugcaguggcccaaggagaaguccaagcgcggccuguucugggcgaacauccgggccgccuucaacaugaagcucacccuggugacggagaacaacgacgugaaguccuga

SEQ ID NO: 9749 - RNA, 2391 nt, Artificial Sequence
  derived and/or modified sequence opt2 from TLR6__Homo_sapiens__AAY88761
augaccaaggacaaggagcccaucgucaaguccuuccacuucgucugccucaugaucaucaucgucggcacccgcauccaguucuccgacggcaacgaguucgccgucgacaaguccaagcgcggccucauccacguccccaaggaccucccccucaagaccaagguccucgacaugucccagaacuacaucgccgagcuccaggucuccgacauguccuuccucuccgagcucaccguccuccgccucucccacaaccgcauccagcuccucgaccucuccgucuucaaguucaaccaggaccucgaguaccucgaccucucccacaaccagcuccagaagaucuccugccaccccaucgucuccuuccgccaccucgaccucuccuucaacgacuucaaggcccuccccaucugcaaggaguucggcaaccucucccagcucaacuuccucggccucuccgccaugaagcuccagaagcucgaccuccuccccaucgcccaccuccaccucuccuacauccuccucgaccuccgcaacuacuacaucaaggagaacgagaccgagucccuccagauccucaacgccaagacccuccaccucgucuuccaccccaccucccucuucgccauccaggucaacaucuccgucaacacccucggcugccuccagcucaccaacaucaagcucaacgacgacaacugccaggucuucaucaaguuccucuccgagcucacccgcggccccacccuccucaacuucacccucaaccacaucgagaccaccuggaagugccucguccgcgucuuccaguuccucuggcccaagcccgucgaguaccucaacaucuacaaccucaccaucaucgaguccauccgcgaggaggacuucaccuacuccaagaccacccucaaggcccucaccaucgagcacaucaccaaccaggucuuccucuucucccagaccgcccucuacaccauguucuccgagaugaacaucaugaugcucaccaucuccgacacccccuucauccacaugcucugcccccacgcccccuccaccuucaaguuccucaacuucacccagaacgucuucaccgacuccaucuucgagaagugcuccacccucgucaagcucgagacccucauccuccagaagaacggccucaaggaccucuucaaggucggccucaugaccaaggacaugcccucccucgagauccucgacgucuccuggaacucccucgaguccggccgccacaaggagaacugcaccugggucgaguccaucgucguccucaaccucuccuccaacaugcucaccgacuccgucuuccgcugccuccccccccgcaucaagguccucgaccuccacuccaacaagaucaaguccauccccaagcaggucgucaagcucgaggcccuccaggagcucaacgucgccuucaacucccucaccgaccuccccggcugcggcuccuucuccucccucuccguccucaucaucgaccacaacuccgucucccaccccuccgccgacuucuuccaguccugccagaagaugcgcuccaucaaggccggcgacaaccccuuccagugcaccugcgagcuccgcgaguucgucaagaacaucgaccaggucuccuccgagguccucgagggcuggcccgacuccuacaagugcgacuaccccgaguccuaccgcggcuccccccucaaggacuuccacauguccgagcucuccugcaacaucacccuccucaucgucaccaucggcgccaccaugcucguccucgccgucaccgucaccucccucugcaucuaccucgaccuccccugguaccuccgcauggucugccaguggacccagacccgccgccgcgcccgcaacaucccccucgaggagcuccagcgcaaccuccaguuccacgccuucaucuccuacuccgagcacgacuccgccugggucaaguccgagcucguccccuaccucgagaaggaggacauccagaucugccuccacgagcgcaacuucguccccggcaaguccaucgucgagaacaucaucaacugcaucgagaaguccuacaaguccaucuucguccucucccccaacuucguccaguccgaguggugccacuacgagcucuacuucgcccaccacaaccucuuccacgagggcuccaacaaccucauccucauccuccucgagcccaucccccagaacuccauccccaacaaguaccacaagcucaaggcccucaugaugcagcgcaccuaccuccaguggcccaaggagaaguccaagcgcggccucuucugggccaacauccgcgccgccuucaacaugaagcucacccucgucaccgagaacaacgacgucaaguccuga

SEQ ID NO: 9750 - RNA, 2391 nt, Artificial Sequence
  derived and/or modified sequence opt3 from TLR6__Homo_sapiens__AAY88761
augaccaaggacaaagagcccaucgucaagagcuuccacuuugugugccugaugauuauaaucguuggcacaaggauucaguucuccgaugggaacgaauuugccguggacaaaucuaagagaggacucauccauguaccuaaagaucuuccacugaagacuaagguguuggacaugucacaaaauuacauugcugaguuacaggucagugauaugagcuuccuguccgaacuaacggugcuccggcugucucacaaccgcauccagcuucuggacuugucgguuuuuaaauucaaucaggaucucgaguaucuggaccugucacauaaccaacuccagaagauaagcugucacccgaucgugaguuuucgacauuuagaucuguccuucaaugacuuuaaagcacuucccauuugcaaggaguucgguaacuugucucagcugaauuuucuaggccucagcgccaugaaacugcagaaacuugaucuguugccuaucgcgcaccuccaccuguccuacauuuuacuggaccuccguaacuauuacaucaaggagaaugagaccgaaucacuucaaauacugaacgcuaagacauugcaucuagucuuccacccaacuucccuguuugccauucaggugaauaucagcguaaacacccucgggugucugcagcuuacaaauauuaagcugaacgaugacaauugccagguuuucaucaaauucuugucugagcucaccagaggacccacucuguuaaacuuuacacugaaccauaucgaaaccacguggaagugucuagugagggucuuccaauuucucuggccuaaaccaguggaguaucugaauauuuacaaccuuacuauaaucgaguccauucgggaagaggacuucaccuauucaaagacaacuuugaaagcacugaccaucgaacacauaacaaaucagguguuucucuucagccagaccgcccuguacacgauguuuagugagaugaacauuaugaugcuuacuaucucugauacacccuucauccacaugcugugcccucaugcuccauccaccuuuaaguucuugaauuuuacucaaaacgucuucacagacagcauuuuugaaaaguguucgacccucguuaaacuggagacguuaauccugcagaagaauggccuaaaagaucucuucaaggugggucugaugaccaaagacaugccgucucuugagauuuuggauguauccuggaacucacuggaaagugggcgccacaaggagaauugcacauggguggaaagcauagucgugcucaaccuguccucuaauauguuaacugacagcguuuucagaugucugcccccuaggaucaaggugcuugauuugcauucaaacaaaauuaagaguaucccaaaacaggucgugaagcucgaggcacugcaggaacuaaauguagccuuuaacucccugaccgaccuccccggaugcggcagcuucucuucacugaguguucuuaucauugaucacaauagcgugucccauccuucugcugacuuuuuccaaucgugucagaaaaugcggagcauaaaggccggcgauaacccauuucagugcacaugcgaguugcgcgaguucgucaagaacaucgaccagguguccucagaaguccuggagggguggcccgacaguuacaaaugugauuauccggaaucuuaccgaggaagcccuuuaaaggacuuucacauguccgagcucucaugcaauauuacucugcuuaucgugaccauuggugcgacaaugcugguuuuggcagugaccguaacuagccucuguaucuaucuggaucuacccugguaccugagaauggucugccaauggacgcagacaaggcggcgugcccgcaacauaccacucgaagaacugcagagaaaucuucaguuccacgcuuuuaucucuuauuccgagcaugacagugccugggugaaaagcgaauugguuccuuaccuggagaaggaagauauucaaaucuguuuacacgagaggaacuucgugcccggcaaaucuauugucgagaauaucauaaacugcauugaaaaguccuauaagucaaucuuugugcucaguccaaauuucguacagagcgaguggugucauuacgaacuguacuuugcacaccacaaccuuuuccaugaggggucgaauaaccugauucuaauccuccuggaacccauaccucagaauaguaucccaaacaaauaucacaaguugaaagcucugaugaugcagcggaccuacuuacaauggccgaaggagaaaucuaagcgaggacucuucugggccaauauucgcgcggccuuuaacaugaaacugacucuugugaccgagaauaacgacguuaagagcuga

SEQ ID NO: 9751 - RNA, 2391 nt, Artificial Sequence
  derived and/or modified sequence opt4 from TLR6__Homo_sapiens__AAY88761
augaccaaggacaaggagcccaucgugaagagcuuccacuucgugugccugaugaucaucaucgugggcaccagaauccaguucagcgacggcaacgaguucgccguggacaagagcaagagaggccugauccacgugcccaaggaccugccccugaagaccaaggugcuggacaugagccagaacuacaucgccgagcugcaggugagcgacaugagcuuccugagcgagcugaccgugcugagacugagccacaacagaauccagcugcuggaccugagcguguucaaguucaaccaggaccuggaguaccuggaccugagccacaaccagcugcagaagaucagcugccaccccaucgugagcuucagacaccuggaccugagcuucaacgacuucaaggcccugcccaucugcaaggaguucggcaaccugagccagcugaacuuccugggccugagcgccaugaagcugcagaagcuggaccugcugcccaucgcccaccugcaccugagcuacauccugcuggaccugagaaacuacuacaucaaggagaacgagaccgagagccugcagauccugaacgccaagacccugcaccugguguuccaccccaccagccuguucgccauccaggugaacaucagcgugaacacccugggcugccugcagcugaccaacaucaagcugaacgacgacaacugccagguguucaucaaguuccugagcgagcugaccagaggccccacccugcugaacuucacccugaaccacaucgagaccaccuggaagugccuggugagaguguuccaguuccuguggcccaagcccguggaguaccugaacaucuacaaccugaccaucaucgagagcaucagagaggaggacuucaccuacagcaagaccacccugaaggcccugaccaucgagcacaucaccaaccagguguuccuguucagccagaccgcccuguacaccauguucagcgagaugaacaucaugaugcugaccaucagcgacacccccuucauccacaugcugugcccccacgcccccagcaccuucaaguuccugaacuucacccagaacguguucaccgacagcaucuucgagaagugcagcacccuggugaagcuggagacccugauccugcagaagaacggccugaaggaccuguucaaggugggccugaugaccaaggacaugcccagccuggagauccuggacgugagcuggaacagccuggagagcggcagacacaaggagaacugcaccuggguggagagcaucguggugcugaaccugagcagcaacaugcugaccgacagcguguucagaugccugccccccagaaucaaggugcuggaccugcacagcaacaagaucaagagcauccccaagcagguggugaagcuggaggcccugcaggagcugaacguggccuucaacagccugaccgaccugcccggcugcggcagcuucagcagccugagcgugcugaucaucgaccacaacagcgugagccaccccagcgccgacuucuuccagagcugccagaagaugagaagcaucaaggccggcgacaaccccuuccagugcaccugcgagcugagagaguucgugaagaacaucgaccaggugagcagcgaggugcuggagggcuggcccgacagcuacaagugcgacuaccccgagagcuacagaggcagcccccugaaggacuuccacaugagcgagcugagcugcaacaucacccugcugaucgugaccaucggcgccaccaugcuggugcuggccgugaccgugaccagccugugcaucuaccuggaccugcccugguaccugagaauggugugccaguggacccagaccagaagaagagccagaaacaucccccuggaggagcugcagagaaaccugcaguuccacgccuucaucagcuacagcgagcacgacagcgccugggugaagagcgagcuggugcccuaccuggagaaggaggacauccagaucugccugcacgagagaaacuucgugcccggcaagagcaucguggagaacaucaucaacugcaucgagaagagcuacaagagcaucuucgugcugagccccaacuucgugcagagcgaguggugccacuacgagcuguacuucgcccaccacaaccuguuccacgagggcagcaacaaccugauccugauccugcuggagcccaucccccagaacagcauccccaacaaguaccacaagcugaaggcccugaugaugcagagaaccuaccugcaguggcccaaggagaagagcaagagaggccuguucugggccaacaucagagccgccuucaacaugaagcugacccuggugaccgagaacaacgacgugaagagcuga

SEQ ID NO: 9752 - RNA, 2391 nt, Artificial Sequence
  derived and/or modified sequence opt5 from TLR6__Homo_sapiens__AAY88761
augaccaaggacaaagagcccaucgugaaguccuuccacuuugucugccugaugauuaucauuguuggcacaagaauccaguucuccgaugggaacgaauuugccguggacaaaucuaagcggggacucauucaugugccuaaagaucugccgcuuaagacgaagguccuggacaugagccaaaauuacaucgcugagcuccagguguccgauaugucuuuccugagcgaacuuaccguucugcgccucucccacaacagaauccagcugcuggaccucucuguguuuaaauucaaucaggaucuggaguaucuugaccugagccauaaccaacuccagaagauuuccugucaccccaucgucagcuuucggcaucuggaucuuucuuucaaugacuuuaaagcccugccuauuugcaaggaguucggcaaccucucccagcugaauuuucuggggcucagcgcgaugaaacugcagaagcucgaucugcuccccaucgcucaucugcaccuuucuuacauucugcucgaccugcgcaacuauuacaucaaggagaaugagacagaaucccugcaaauucucaacgccaaaacccugcaccuuguguuccacccuacaagccuguuugccauccagguuaauaucucugugaacacccucggaugucugcagcuuacaaauauuaagcugaacgaugacaauugccaggucuucaucaaauuccucuccgagcugaccagaggccccacgcugcucaacuuuacccugaaccauauugaaacaaccuggaagugucuugugcggguguuccaauuucuguggccuaaaccggucgaguaucucaauaucuacaaccugacaauuaucgagagcauccgcgaagaggacuucaccuauuccaagacgacacugaaagcucuuaccauugaacacaucacaaaucagguuuuucucuucucucagaccgcccuguacaccauguuuagcgagaugaacauuaugaugcugacaaucuccgauacgcccuucauucacaugcucugcccucaugcucccagcaccuuuaaguuccugaauuuuacacaaaacguguucaccgacucuaucuuugaaaaguguuccacacuugugaaacuggagacccucauccugcagaagaaugggcugaaagaucuuuucaaggucggacucaugacgaaagacaugccuagccuggagauucuggaugugucuuggaacagccucgaauccggcagacacaaggagaauugcacauggguugaaucuaucgugguccugaaccuuagcuccaauaugcugaccgacagcguguuccggugucuucccccgcgcauuaagguucuggaucugcauucuaacaaaaucaaguccauuccuaaacagguggucaaacuugaggcccuccaggaacugaauguggcguuuaacagccugaccgaccuccccggcugcgggucuuucuccagccuguccguccuuaucauugaucacaauucugugagccauccuuccgccgacuuuuuccaaucuugucagaagaugagaagcaucaaggcuggagauaaccccuuucagugcacaugcgagcugcgggaguucguuaagaacaucgaccagguguccagcgaaguccucgagggcuggcccgacucuuacaaaugugauuauccugaauccuaccgcgggagcccgcugaaggacuuucacaugucugagcuguccugcaauauuacccuucucaucgugacaauuggagccacgaugcugguucuggcugugaccgucacaagccucuguaucuaucuggaucuucccugguaccugagaauggugugccaauggacccagacacggcgcagagcccggaacauuccucucgaagaacugcagagaaaucugcaguuccacgcguuuaucucuuauagcgagcaugacuccgccugggugaaaagcgaacuuguucccuaccuggagaaggaagauauccaaauuugucuccacgagcgcaacuucgucccuggcaaaucuaucguggagaauauuaucaacugcauugaaaaguccuauaagagcaucuuugugcugucccccaauuucguccagucugaguggugucauuacgaacucuacuuugcucaccacaaccuguuccaugaggggagcaauaaccuuauccugauucuccuggaaccgaucccucagaauagcauucccaacaaauaucacaagcugaaagcccuuaugaugcagcggaccuaccugcaauggccuaaggagaaaucuaagagaggacucuucugggcuaauauccgcgccgccuuuaacaugaaacugacgcucgugaccgagaauaacgacguuaagagcuga

SEQ ID NO: 9753 - protein, 796 aa, Artificial Sequence [sequence omitted]

SEQ ID NO: 9754 - RNA, 2391 nt, Artificial Sequence
  TLR6__Homo_sapiens__AAY88762
augaccaaagacaaagaaccuauuguuaaaagcuuccauuuuguuugccuuaugaucauaauaguuggaaccagaauccaguucuccgacggaaaugaauuugcaguagacaagucaaaaagaggucuuauucauguuccaaaagaccuaccgcugaaaaccaaagucuuagauaugucucagaacuacaucgcugagcuucaggucucugacaugagcuuucuaucagaguugacaguuuugagacuuucccauaacagaauccagcuacuugauuuaaguguuuucaaguucaaccaggauuuagaauauuuggauuuaucucauaaucaguugcaaaagauauccugccauccuacugugaguuucaggcauuuagaucucucauucaaugauuucaaggcccugcccaucuguaaggaauuuggcaacuuaucacaacugaauuucuugggauugagugcuaugaagcugcaaaaauuagauuugcugccaauugcucacuugcaucuaaguuauauccuucuggauuuaagaaauuauuauauaaaagaaaaugagacagaaagucuacaaauucugaaugcaaaaacccuucaccuuguuuuucacccaacuaguuuauucgcuauccaagugaacauaucaguuaauacuuuagggugcuuacaacugacuaauauuaaauugaaugaugacaacugucaaguuuucauuaaauuuuuaucagaacucaccagagguccaaccuuacugaauuuuacccucaaccacauagaaacgacuuggaaaugccuggucagagucuuucaauuucuuuggcccaaaccuguggaauaucucaauauuuacaauuuaacaauaauugaaagcauucgugaagaagauuuuacuuauucuaaaacgacauugaaagcauugacaauagaacauaucacgaaccaaguuuuucuguuuucacagacagcuuuguacaccguguuuucugagaugaacauuaugauguuaaccauuucagauacaccuuuuauacacaugcuguguccucaugcaccaagcacauucaaguuuuugaacuuuacgcagaacguuuucacagauaguauuuuugaaaaauguuccacguuaguuaaauuggagacacuuaucuuacaaaagaauggauuaaaagaccuuuucaaaguaggucucaugacgaaggauaugccuucuuuggaaauacuggauguuagcuggaauucuuuggaaucugguagacauaaggaaaacugcacuuggguugagaguauagugguguuaaauuugucuucaaauaugcuuacugacucuguuuucagauguuuaccucccaggaucaagguacuugaucuucacagcaauaaaauaaagagcauuccuaaacaagucguaaaacuggaagcuuugcaagaacucaauguugcuuucaauucuuuaacugaccuuccuggauguggcagcuuuagcagccuuucuguauugaucauugaucacaauucaguuucccacccaucggcugauuucuuccagagcugccagaagaugaggucaauaaaagcaggggacaauccauuccaauguaccugugagcuaagagaauuugucaaaaauauagaccaaguaucaagugaaguguuagagggcuggccugauucuuauaagugugacuacccagaaaguuauagaggaagcccacuaaaggacuuucacaugucugaauuauccugcaacauaacucugcugaucgucaccaucggugccaccaugcugguguuggcugugacugugaccucccucugcaucuacuuggaucugcccugguaucucaggauggugugccaguggacccagacucggcgcagggccaggaacauacccuuagaagaacuccaaagaaaccuccaguuucaugcuuuuauuucauauagugaacaugauucugccugggugaaaagugaauugguaccuuaccuagaaaaagaagauauacagauuugucuucaugagagaaacuuugucccuggcaagagcauuguggaaaauaucaucaacugcauugagaagaguuacaaguccaucuuuguuuugucucccaacuuuguccagagugaguggugccauuacgaacucuauuuugcccaucacaaucucuuucaugaaggaucuaauaacuuaauccucaucuuacuggaacccauuccacagaacagcauucccaacaaguaccacaagcugaaggcucucaugaugcagcggacuuauuugcaguggcccaaggagaaaagcaaacgugggcucuuuugggcuaacauuagagccgcuuuuaauaugaaauuaacacuagucacugaaaacaaugaugugaaaucuuaa

SEQ ID NO: 9755 - RNA, 2391 nt, Artificial Sequence
  derived and/or modified sequence opt1 from TLR6__Homo_sapiens__AAY88762
augaccaaggacaaggagcccaucgucaagagcuuccacuucgugugccugaugaucaucaucgugggcacccgcauccaguucuccgacgggaacgaguucgccguggacaagagcaagcggggccucauccacgucccgaaggaccugccccugaagacgaaggugcucgacaugucccagaacuacaucgccgagcuccaggugagcgacauguccuuccugagcgagcugaccguccugcgccugucccacaaccggauccagcuccuggaccugagcguguucaaguucaaccaggaccucgaguaccuggaccugucccacaaccagcuccagaagaucagcugccaccccaccguguccuuccgccaccuggaccugagcuucaacgacuucaaggcgcuccccaucugcaaggaguucgggaaccugucccagcugaacuuccucggccugagcgccaugaagcugcagaagcucgaccugcugccgaucgcccaccuccaccuguccuacauccugcucgaccugcggaacuacuacaucaaggagaacgagaccgagagccugcagauccucaacgccaagacgcugcaccuggucuuccaccccaccucccucuucgccauccaggugaacaucagcgugaacacccuggggugccugcagcucaccaacaucaagcugaacgacgacaacugccaggucuucaucaaguuccuguccgagcucacgcgcggccccacccugcugaacuucacccucaaccacaucgagaccacguggaagugccuggugcggguguuccaguuccuguggcccaagccggucgaguaccucaacaucuacaaccugaccaucaucgagagcauccgcgaggaggacuucaccuacagcaagaccacgcugaaggcgcugaccaucgagcacaucaccaaccagguguuccucuucucccagaccgcccuguacacgguguucagcgagaugaacaucaugaugcugaccaucuccgacacccccuucauccacaugcucugcccccacgcccccagcaccuucaaguuccugaacuucacgcagaacgucuucaccgacuccaucuucgagaagugcagcacccuggugaagcucgagacccugauccugcagaagaacggccucaaggaccuguucaagguggggcugaugacgaaggacaugccgucccucgagauccuggacgucagcuggaacucccuggagagcggccggcacaaggagaacugcaccuggguggaguccaucgugguccucaaccugagcuccaacaugcugaccgacagcguguuccgcugccucccgccccggaucaagguccuggaccugcacuccaacaagaucaagagcauccccaagcaggucgugaagcucgaggcccugcaggagcugaacguggcguucaacucccucaccgaccugcccgggugcggcagcuucuccagccugagcgugcucaucaucgaccacaacuccgugagccaccccuccgccgacuucuuccagagcugccagaagaugcgcuccaucaaggccggggacaaccccuuccagugcacgugcgagcugcgggaguucgucaagaacaucgaccaggugagcuccgaggugcuggagggcuggcccgacagcuacaagugcgacuacccggaguccuaccgcggcagcccccucaaggacuuccacauguccgagcugagcugcaacaucacccugcucaucgucaccaucggggccaccaugcuggugcuggccgugacggucaccucccucugcaucuaccuggaccugcccugguaccuccggauggugugccaguggacccagacccgccggcgcgcgcggaacaucccccuggaggagcugcagcgcaaccuccaguuccacgccuucaucagcuacuccgagcacgacagcgccugggugaaguccgagcuggucccguaccuggagaaggaggacauccagaucugccuccacgagcggaacuucgugcccggcaagagcaucguggagaacaucaucaacugcaucgagaaguccuacaagagcaucuucguccugagccccaacuucgugcaguccgaguggugccacuacgagcuguacuucgcccaccacaaccucuuccacgaggggagcaacaaccugauccugauccuccuggagcccaucccgcagaacuccauccccaacaaguaccacaagcugaaggcccucaugaugcagcgcaccuaccugcaguggcccaaggagaaguccaagcgcggccuguucugggcgaacauccgggccgccuucaacaugaagcucacgcuggugaccgagaacaacgacgucaagagcuga

SEQ ID NO: 9756 - RNA, 2391 nt, Artificial Sequence
  derived and/or modified sequence opt2 from TLR6__Homo_sapiens__AAY88762
augaccaaggacaaggagcccaucgucaaguccuuccacuucgucugccucaugaucaucaucgucggcacccgcauccaguucuccgacggcaacgaguucgccgucgacaaguccaagcgcggccucauccacguccccaaggaccucccccucaagaccaagguccucgacaugucccagaacuacaucgccgagcuccaggucuccgacauguccuuccucuccgagcucaccguccuccgccucucccacaaccgcauccagcuccucgaccucuccgucuucaaguucaaccaggaccucgaguaccucgaccucucccacaaccagcuccagaagaucuccugccaccccaccgucuccuuccgccaccucgaccucuccuucaacgacuucaaggcccuccccaucugcaaggaguucggcaaccucucccagcucaacuuccucggccucuccgccaugaagcuccagaagcucgaccuccuccccaucgcccaccuccaccucuccuacauccuccucgaccuccgcaacuacuacaucaaggagaacgagaccgagucccuccagauccucaacgccaagacccuccaccucgucuuccaccccaccucccucuucgccauccaggucaacaucuccgucaacacccucggcugccuccagcucaccaacaucaagcucaacgacgacaacugccaggucuucaucaaguuccucuccgagcucacccgcggccccacccuccucaacuucacccucaaccacaucgagaccaccuggaagugccucguccgcgucuuccaguuccucuggcccaagcccgucgaguaccucaacaucuacaaccucaccaucaucgaguccauccgcgaggaggacuucaccuacuccaagaccacccucaaggcccucaccaucgagcacaucaccaaccaggucuuccucuucucccagaccgcccucuacaccgucuucuccgagaugaacaucaugaugcucaccaucuccgacacccccuucauccacaugcucugcccccacgcccccuccaccuucaaguuccucaacuucacccagaacgucuucaccgacuccaucuucgagaagugcuccacccucgucaagcucgagacccucauccuccagaagaacggccucaaggaccucuucaaggucggccucaugaccaaggacaugcccucccucgagauccucgacgucuccuggaacucccucgaguccggccgccacaaggagaacugcaccugggucgaguccaucgucguccucaaccucuccuccaacaugcucaccgacuccgucuuccgcugccuccccccccgcaucaagguccucgaccuccacuccaacaagaucaaguccauccccaagcaggucgucaagcucgaggcccuccaggagcucaacgucgccuucaacucccucaccgaccuccccggcugcggcuccuucuccucccucuccguccucaucaucgaccacaacuccgucucccaccccuccgccgacuucuuccaguccugccagaagaugcgcuccaucaaggccggcgacaaccccuuccagugcaccugcgagcuccgcgaguucgucaagaacaucgaccaggucuccuccgagguccucgagggcuggcccgacuccuacaagugcgacuaccccgaguccuaccgcggcuccccccucaaggacuuccacauguccgagcucuccugcaacaucacccuccucaucgucaccaucggcgccaccaugcucguccucgccgucaccgucaccucccucugcaucuaccucgaccuccccugguaccuccgcauggucugccaguggacccagacccgccgccgcgcccgcaacaucccccucgaggagcuccagcgcaaccuccaguuccacgccuucaucuccuacuccgagcacgacuccgccugggucaaguccgagcucguccccuaccucgagaaggaggacauccagaucugccuccacgagcgcaacuucguccccggcaaguccaucgucgagaacaucaucaacugcaucgagaaguccuacaaguccaucuucguccucucccccaacuucguccaguccgaguggugccacuacgagcucuacuucgcccaccacaaccucuuccacgagggcuccaacaaccucauccucauccuccucgagcccaucccccagaacuccauccccaacaaguaccacaagcucaaggcccucaugaugcagcgcaccuaccuccaguggcccaaggagaaguccaagcgcggccucuucugggccaacauccgcgccgccuucaacaugaagcucacccucgucaccgagaacaacgacgucaaguccuga

SEQ ID NO: 9757 - RNA, 2391 nt, Artificial Sequence
  derived and/or modified sequence opt3 from TLR6__Homo_sapiens__AAY88762
augaccaaggacaaagagcccaucgugaaguccuuccacuuugucugccugaugauuauaaucguuggcacaaggauucaguucuccgaugggaacgaauuugccguggacaaaucuaagagaggacucauccauguaccuaaagaucuuccacugaagacuaagguguuggacaugucacaaaauuacauugcugaguuacaggucagugauaugagcuuccuguccgaacuaacggugcuccggcugucucacaaccgcauccagcuucuggacuugucgguuuuuaaauucaaucaggaucucgaguaucuggaccugucacauaaccaacuccagaagauaagcugucacccgaccgugaguuuucgacauuuagaucuguccuucaaugacuuuaaagcacuucccaucugcaaggaguucgguaacuugucucagcugaauuuucuaggccucagcgccaugaaacugcagaaacuugaucuguugccuauugcgcaccuccaccuguccuacaucuuacuggaccuccguaacuauuacauuaaggagaaugagacagaaucacuucaaauccugaacgcuaagacuuugcaucuagucuuccacccaaccagucuguuugccauacaggugaauauuagcguaaacacacucgggugucugcagcuuaccaauaucaagcugaacgaugacaauugccagguuuucauuaaauucuugucugagcucacuagaggacccacacuguuaaacuuuacccugaaccauaucgaaacgacuuggaagugucuagugagggucuuccaauuucucuggccuaaaccaguggaguaucugaauaucuacaaccuuaccauuauagaguccauccgggaagaggacuucacauauucaaagacuaccuugaaagcacugacaauugaacacaucaccaaucagguguuucucuucagccagacggcccuguacacugucuuuagugagaugaacauaaugaugcuuacaauuucugauacccccuucauccacaugcugugcccucaugcuccauccacuuuuaaguucuugaauuuuacacaaaacguuuucaccgacagcaucuuugaaaaguguucgacgcucgugaaacuggagaccuuaauucugcagaagaauggccuaaaagaucucuucaagguaggucugaugacaaaagacaugccgucucuugagaucuuggauguguccuggaacucacuggaaagugggcgccacaaggagaauugcacuugggucgaaagcauugugguucucaaccuguccucuaauauguuaaccgacagcguguucagaugucugcccccuaggauaaagguccuugauuugcauucaaacaaaaucaagaguauuccaaaacaggugguaaagcucgaggcacugcaggaacuaaauguugccuuuaacucccugacagaccuccccggaugcggcagcuucucuucacugagugugcuuaucaucgaucacaauagcgucucccauccuucugcugacuuuuuccaaucgugucagaaaaugcggagcauuaaggccggcgauaacccauuucagugcacuugcgaguugcgcgaguucgugaagaacauagaccaggucuccucagaagugcuggagggguggcccgacaguuacaaaugugauuauccggaaucuuaccgaggaagcccuuuaaaggacuuucacauguccgagcucucaugcaauaucacccugcuuauuguuacaaucggugcgaccaugcugguguuggcaguaacugucacgagccucuguauuuaucuggaucuacccugguaccugagaauggugugccaauggacacagaccaggcggcgugcccgcaacaucccacucgaagaacugcagagaaaucuucaguuccacgcuuuuauaucuuauuccgagcaugacagugccuggguuaaaagcgaauuggugccuuaccuggagaaggaagauauccaaauuuguuuacacgagaggaacuucguccccggcaaaucuaucguggagaauauuaucaacugcauagaaaaguccuauaagucaauuuuuguacucaguccaaauuucgugcagagcgaguggugucauuacgaacuguacuuugcacaccacaaccuuuuccaugaggggucgaauaaccugauccuaauucuccuggaacccaucccucagaauagcauaccaaacaaauaucacaaguugaaagcucugaugaugcagcggacuuacuuacaauggccgaaggagaaaucuaagcgaggacucuucugggccaauauccgcgcggccuuuaacaugaaacugacccuuguuacagagaauaacgacgucaagagcuga

SEQ ID NO: 9758 - RNA, 2391 nt, Artificial Sequence
  derived and/or modified sequence opt4 from TLR6__Homo_sapiens__AAY88762
augaccaaggacaaggagcccaucgugaagagcuuccacuucgugugccugaugaucaucaucgugggcaccagaauccaguucagcgacggcaacgaguucgccguggacaagagcaagagaggccugauccacgugcccaaggaccugccccugaagaccaaggugcuggacaugagccagaacuacaucgccgagcugcaggugagcgacaugagcuuccugagcgagcugaccgugcugagacugagccacaacagaauccagcugcuggaccugagcguguucaaguucaaccaggaccuggaguaccuggaccugagccacaaccagcugcagaagaucagcugccaccccaccgugagcuucagacaccuggaccugagcuucaacgacuucaaggcccugcccaucugcaaggaguucggcaaccugagccagcugaacuuccugggccugagcgccaugaagcugcagaagcuggaccugcugcccaucgcccaccugcaccugagcuacauccugcuggaccugagaaacuacuacaucaaggagaacgagaccgagagccugcagauccugaacgccaagacccugcaccugguguuccaccccaccagccuguucgccauccaggugaacaucagcgugaacacccugggcugccugcagcugaccaacaucaagcugaacgacgacaacugccagguguucaucaaguuccugagcgagcugaccagaggccccacccugcugaacuucacccugaaccacaucgagaccaccuggaagugccuggugagaguguuccaguuccuguggcccaagcccguggaguaccugaacaucuacaaccugaccaucaucgagagcaucagagaggaggacuucaccuacagcaagaccacccugaaggcccugaccaucgagcacaucaccaaccagguguuccuguucagccagaccgcccuguacaccguguucagcgagaugaacaucaugaugcugaccaucagcgacacccccuucauccacaugcugugcccccacgcccccagcaccuucaaguuccugaacuucacccagaacguguucaccgacagcaucuucgagaagugcagcacccuggugaagcuggagacccugauccugcagaagaacggccugaaggaccuguucaaggugggccugaugaccaaggacaugcccagccuggagauccuggacgugagcuggaacagccuggagagcggcagacacaaggagaacugcaccuggguggagagcaucguggugcugaaccugagcagcaacaugcugaccgacagcguguucagaugccugccccccagaaucaaggugcuggaccugcacagcaacaagaucaagagcauccccaagcagguggugaagcuggaggcccugcaggagcugaacguggccuucaacagccugaccgaccugcccggcugcggcagcuucagcagccugagcgugcugaucaucgaccacaacagcgugagccaccccagcgccgacuucuuccagagcugccagaagaugagaagcaucaaggccggcgacaaccccuuccagugcaccugcgagcugagagaguucgugaagaacaucgaccaggugagcagcgaggugcuggagggcuggcccgacagcuacaagugcgacuaccccgagagcuacagaggcagcccccugaaggacuuccacaugagcgagcugagcugcaacaucacccugcugaucgugaccaucggcgccaccaugcuggugcuggccgugaccgugaccagccugugcaucuaccuggaccugcccugguaccugagaauggugugccaguggacccagaccagaagaagagccagaaacaucccccuggaggagcugcagagaaaccugcaguuccacgccuucaucagcuacagcgagcacgacagcgccugggugaagagcgagcuggugcccuaccuggagaaggaggacauccagaucugccugcacgagagaaacuucgugcccggcaagagcaucguggagaacaucaucaacugcaucgagaagagcuacaagagcaucuucgugcugagccccaacuucgugcagagcgaguggugccacuacgagcuguacuucgcccaccacaaccuguuccacgagggcagcaacaaccugauccugauccugcuggagcccaucccccagaacagcauccccaacaaguaccacaagcugaaggcccugaugaugcagagaaccuaccugcaguggcccaaggagaagagcaagagaggccuguucugggccaacaucagagccgccuucaacaugaagcugacccuggugaccgagaacaacgacgugaagagcuga

SEQ ID NO: 9759 - RNA, 2391 nt, Artificial Sequence
  derived and/or modified sequence opt5 from TLR6__Homo_sapiens__AAY88762
augaccaaggacaaagagcccaucgugaaguccuuccacuuugugugccugaugauuaucauuguuggcacaagaauccaguucuccgaugggaacgaauuugccguggacaaaucuaagcggggacucauucaugugccuaaagaucugccgcuuaagacgaagguccuggacaugagccaaaauuacaucgcugagcuccagguguccgauaugucuuuccugagcgaacuuaccguucugcgccucucccacaacagaauccagcugcuggaccucucuguguuuaaauucaaucaggaucuggaguaucuugaccugagccauaaccaacuccagaagauuuccugucaccccacagucagcuuucggcaucuggaucuuucuuucaaugacuuuaaagcccugccuaucugcaaggaguucggcaaccucucccagcugaauuuucuggggcucagcgcgaugaaacugcagaagcucgaucugcuccccauugcucaucugcaccuuucuuacauccugcucgaccugcgcaacuauuacauuaaggagaaugagaccgaaucccugcaaauccucaacgccaaaacacugcaccuuguguuccacccuaccagccuguuugccauucagguuaauaucucugugaacacacucggaugucugcagcuuaccaauaucaagcugaacgaugacaauugccaggucuucauuaaauuccucuccgagcugacgagaggccccacccugcucaacuuuacacugaaccauaucgaaaccacauggaagugucuugugcggguguuccaauuucuguggccuaaaccggucgaguaucucaauauuuacaaccugaccaucauugagagcauccgcgaagaggacuucacguauuccaagacaacccugaaagcucuuacaaucgaacacauuaccaaucagguuuuucucuucucucagaccgcccuguacacaguguuuagcgagaugaacaucaugaugcugacgauuuccgauacccccuucauccacaugcucugcccucaugcucccagcacauuuaaguuccugaauuuuacccaaaacguguucacagacucuauuuuugaaaaguguuccacccuugucaaacuggagacgcucauccugcagaagaaugggcugaaagaucuuuucaaggugggacucaugacaaaagacaugccuagccuggagauccuggauguuucuuggaacagccucgaauccggcagacacaaggagaauugcaccuggguggaaucuauugucgugcugaaccuuagcuccaauaugcugaccgacagcguuuuccggugucuucccccgcgcaucaaggugcuggaucugcauucuaacaaaauuaaguccaucccuaaacaggucgugaaacuugaggcccuccaggaacugaaugucgcguuuaacagccugacagaccuccccggcugcgggucuuucuccagccuguccgugcuuauuaucgaucacaauucuguuagccauccuuccgccgacuuuuuccaaucuugucagaagaugagaagcauuaaggcuggagauaaccccuuucaguguaccugcgagcugcgggaguucgugaagaacaucgaccaggucuccagcgaagugcucgagggcuggcccgacucuuacaaaugcgauuauccugaauccuaccgcgggagcccgcugaaggacuuucacaugucugagcuguccugcaauaucacacuucucauuguuacgaucggagccaccaugcuggugcuggcugucacagugaccagccucuguauuuaucuggaucuucccugguaccugagaauggugugccaauggacacagacccggcgcagagcccggaacaucccucucgaagaacugcagagaaaucugcaguuccacgcguuuauuucuuauagcgagcaugacuccgccuggguuaaaagcgaacuuguccccuaccuggagaaggaagauauccaaaucugucuccacgagcgcaacuucgugccuggcaaaucuauuguggagaauaucauuaacugcaucgaaaaguccuauaagagcauuuuuguccugucccccaauuucgugcagucugaguggugucauuacgaacucuacuuugcucaccacaaccuguuccaugaggggagcaauaaccuuauccugauccuccuggaaccgauuccucagaauagcauccccaacaaauaucacaagcugaaagcccuuaugaugcagcggacguaccugcaauggccuaaggagaaaucuaagagaggacucuucugggcuaauauucgcgccgccuuuaacaugaaacugacccucguuacagagaauaacgacgucaagagcuga

SEQ ID NO: 9760 - protein, 1049 aa, Artificial Sequence
  TLR7__Homo_sapiens__B2R9N9
MVFPMWTLKRQILILFNIILISKLLGARWFPKTLPCDVTLDVPKNHVIVDCTDKHLTEIPGGIPTNTTNLTLTINHIPDISPASFHRLDHLVEIDFRCNCVPIPLGSKNNMCIKRLQIKPRSFSGLTYLKSLYLDGNQLLEIPQGLPPSLQLLSLEANNIFSIRKENLTELANIEILYLGQNCYYRNPCYVSYSIEKDAFLNLTKLKVLSLKDNNVTAVPTVLPSTLTELYLYNNMIAKIQEDDFNNLNQLQILDLSGNCPRCYNAPFPCAPCKNNSPLQIPVNAFDALTELKVLRLHSNSLQHVPPRWFKNINKLQELDLSQNFLAKEIGDAKFLHFLPSLIQLDLSFNFELQVYRASMNLSQAFSSLKSLKILRIRGYVFKELKSFNLSPLHNLQNLEVLDLGTNFIKIANLSMFKQFKRLKVIDLSVNKISPSGDSSEVGFCSNARTSVESYEPQVLEQLHYFRYDKYARSCRFKNKEASFMSVNESCYKYGQTLDLSKNSIFFVKSSDFQHLSFLKCLNLSGNLISQTLNGSEFQPLAELRYLDFSNNRLDLLHSTAFEELHKLEVLDISSNSHYFQSEGITHMLNFTKNLKVLQKLMMNDNDISSSTSRTMESESLRTLEFRGNHLDVLWREGDNRYLQLFKNLLKLEELDISKNSLSFLPSGVFDGMPPNLKNLSLAKNGLKSFSWKKLQCLKNLETLDLSHNQLTTVPERLSNCSRSLKNLILKNNQIRSLTKYFLQDAFQLRYLDLSSNKIQMIQKTSFPENVLNNLKMLLLHHNRFLCTCDAVWFVWWVNHTEVTIPYLATDVTCVGPGAHKGQSVISLDLYTCELDLTNLILFSLSISVSLFLMVMMTASHLYFWDVWYIYHFCKAKIKGYQRLISPDCCYDAFIVYDTKDPAVTEWVLAELVAKLEDPREKHFNLCLEERDWLPGQPVLENLSQSIQLSKKTVFVMTDKYAKTENFKIAFYLSHQRLMDEKVDVIILIFLEKPFQKSKFLQLRKRLCGSSVLEWPTNPQAHPYFWQCLKNALATDNHVAYSQVFKETV

SEQ ID NO: 9761 - RNA, 3150 nt, Artificial Sequence
  TLR7__Homo_sapiens__AAZ99022
augguguuuccaauguggacacugaagagacaaauucuuauccuuuuuaacauaauccuaauuuccaaacuccuuggggcuagaugguuuccuaaaacucugcccugugaugucacucuggauguuccaaagaaccaugugaucguggacugcacagacaagcauuugacagaaauuccuggagguauucccacgaacaccacgaaccucacccucaccauuaaccacauaccagacaucuccccagcguccuuucacagacuggaccaucugguagagaucgauuucagaugcaacuguguaccuauuccacuggggucaaaaaacaacaugugcaucaagaggcugcagauuaaacccagaagcuuuaguggacucacuuauuuaaaaucccuuuaccuggauggaaaccagcuacuagagauaccgcagggccucccgccuagcuuacagcuucucagccuugaggccaacaacaucuuuuccaucagaaaagagaaucuaacagaacuggccaacauagaaauacucuaccugggccaaaacuguuauuaucgaaauccuuguuauguuucauauucaauagagaaagaugccuuccuaaacuugacaaaguuaaaagugcucucccugaaagauaacaaugucacagccgucccuacuguuuugccaucuacuuuaacagaacuauaucucuacaacaacaugauugcaaaaauccaagaagaugauuuuaauaaccucaaccaauuacaaauucuugaccuaaguggaaauugcccucguuguuauaaugccccauuuccuugugcgccguguaaaaauaauucuccccuacagaucccuguaaaugcuuuugaugcgcugacagaauuaaaaguuuuacgucuacacaguaacucucuucagcaugugcccccaagaugguuuaagaacaucaacaaacuccaggaacuggaucugucccaaaacuucuuggccaaagaaauuggggaugcuaaauuucugcauuuucuccccagccucauccaauuggaucugucuuucaauuuugaacuucaggucuaucgugcaucuaugaaucuaucacaagcauuuucuucacugaaaagccugaaaauucugcggaucagaggauaugucuuuaaagaguugaaaagcuuuaaccucucgccauuacauaaucuucaaaaucuugaaguucuugaucuuggcacuaacuuuauaaaaauugcuaaccucagcauguuuaaacaauuuaaaagacugaaagucauagaucuuucagugaauaaaauaucaccuucaggagauucaagugaaguuggcuucugcucaaaugccagaacuucuguagaaaguuaugaaccccagguccuggaacaauuacauuauuucagauaugauaaguaugcaaggaguugcagauucaaaaacaaagaggcuucuuucaugucuguuaaugaaagcugcuacaaguaugggcagaccuuggaucuaaguaaaaauaguauauuuuuugucaaguccucugauuuucagcaucuuucuuuccucaaaugccugaaucugucaggaaaucucauuagccaaacucuuaauggcagugaauuccaaccuuuagcagagcugagauauuuggacuucuccaacaaccggcuugauuuacuccauucaacagcauuugaagagcuucacaaacuggaaguucuggauauaagcaguaauagccauuauuuucaaucagaaggaauuacucauaugcuaaacuuuaccaagaaccuaaagguucugcagaaacugaugaugaacgacaaugacaucucuuccuccaccagcaggaccauggagagugagucucuuagaacucuggaauucagaggaaaucacuuagauguuuuauggagagaaggugauaacagauacuuacaauuauucaagaaucugcuaaaauuagaggaauuagacaucucuaaaaauucccuaaguuucuugccuucuggaguuuuugaugguaugccuccaaaucuaaagaaucucucuuuggccaaaaaugggcucaaaucuuucaguuggaagaaacuccagugucuaaagaaccuggaaacuuuggaccucagccacaaccaacugaccacugucccugagagauuauccaacuguuccagaagccucaagaaucugauucuuaagaauaaucaaaucaggagucugacgaaguauuuucuacaagaugccuuccaguugcgauaucuggaucucagcucaaauaaaauccagaugauccaaaagaccagcuucccagaaaauguccucaacaaucugaagauguugcuuuugcaucauaaucgguuucugugcaccugugaugcugugugguuugucugguggguuaaccauacggaggugacuauuccuuaccuggccacagaugugacuuguguggggccaggagcacacaagggccaaagugugaucucccuggaucuguacaccugugaguuagaucugacuaaccugauucuguucucacuuuccauaucuguaucucucuuucucauggugaugaugacagcaagucaccucuauuucugggaugugugguauauuuaccauuucuguaaggccaagauaaagggguaucagcgucuaauaucaccagacuguugcuaugaugcuuuuauuguguaugacacuaaagacccagcugugaccgaguggguuuuggcugagcugguggccaaacuggaagacccaagagagaaacauuuuaauuuaugucucgaggaaagggacugguuaccagggcagccaguucuggaaaaccuuucccagagcauacagcuuagcaaaaagacaguguuugugaugacagacaaguaugcaaagacugaaaauuuuaagauagcauuuuacuugucccaucagaggcucauggaugaaaaaguugaugugauuaucuugauauuucuugagaagcccuuucagaaguccaaguuccuccagcuccggaaaaggcucugugggaguucuguccuugaguggccaacaaacccgcaagcucacccauacuucuggcagugucugaagaacgcccuggccacagacaaucauguggccuauagucagguguucaaggaaacggucuag

SEQ ID NO: 9762 - RNA, 3150 nt, Artificial Sequence
  derived and/or modified sequence opt1 from TLR7__Homo_sapiens__AAZ99022
augguguuccccauguggacccugaagcgccagauccucauccuguucaacaucauccugaucagcaagcuccugggcgcccggugguucccgaagacccugcccugcgacgucacgcucgacgugcccaagaaccacgugaucgucgacugcaccgacaagcaccugaccgagauccccgggggcaucccgaccaacacgaccaaccugacccucaccaucaaccacauccccgacaucucccccgccagcuuccaccgccuggaccaccugguggagaucgacuuccggugcaacugcgugcccaucccgcucggguccaagaacaacaugugcaucaagcgccugcagaucaagccccggagcuucuccggccugacguaccucaagagccuguaccuggacgggaaccagcuccuggagaucccccagggccugcccccgucccuccagcugcugagccucgaggcgaacaacaucuucuccauccgcaaggagaaccugaccgagcuggccaacaucgagauccucuaccugggccagaacugcuacuaccggaaccccugcuacgucagcuacuccaucgagaaggacgccuuccugaaccucaccaagcugaaggugcugagccucaaggacaacaacgugaccgccguccccacggugcugcccuccacccugaccgagcucuaccuguacaacaacaugaucgccaagauccaggaggacgacuucaacaaccugaaccagcuccagauccuggaccugagcgggaacugcccgcgcugcuacaacgcgcccuuccccugcgcccccugcaagaacaacuccccgcuccagauccccgugaacgccuucgacgcccugaccgagcugaagguccuccggcugcacagcaacucccugcagcacgugccgccccgcugguucaagaacaucaacaagcuccaggagcuggaccugagccagaacuuccuggcgaaggagaucggcgacgccaaguuccuccacuuccugcccucccugauccagcucgaccugagcuucaacuucgagcuccagguguaccgggccagcaugaaccucucccaggccuucagcucccucaagagccugaagauccugcgcauccggggguacgucuucaaggagcugaaguccuucaaccugagcccccuccacaaccugcagaaccuggaggugcucgaccugggcacgaacuucaucaagaucgccaaccuguccauguucaagcaguucaagcgccucaaggugaucgaccugagcgucaacaagaucucccccagcggggacuccagcgaggugggcuucugcuccaacgcgcggaccagcguggaguccuacgagccccagguccuggagcagcuccacuacuuccgcuacgacaaguacgcccggagcugccgcuucaagaacaaggaggccuccuucaugagcgugaacgaguccugcuacaaguacggccagacccuggaccugagcaagaacagcaucuucuucgugaaguccagcgacuuccagcaccucuccuuccugaagugccugaaccucagcgggaaccugaucucccagacccugaacggcagcgaguuccagccgcucgccgagcugcgguaccuggacuucuccaacaaccgccucgaccugcugcacagcacggccuucgaggagcuccacaagcuggagguccuggacaucuccagcaacucccacuacuuccagagcgaggggaucacccacaugcucaacuucaccaagaaccugaaggugcugcagaagcucaugaugaacgacaacgacaucuccagcuccaccagccggacgauggaguccgagagccugcgcacccuggaguuccgcggcaaccaccucgacguccuguggcgggagggcgacaaccgcuaccugcagcuguucaagaaccugcugaagcucgaggagcuggacaucagcaagaacucccugagcuuccuccccuccgggguguucgacggcaugcccccgaaccugaagaaccugagccucgcgaagaacgggcugaaguccuucagcuggaagaagcugcagugccucaagaaccuggagacccuggaccucucccacaaccagcugaccacggugcccgagcggcugagcaacugcucccgcagccucaagaaccugauccugaagaacaaccagauccggucccucaccaaguacuuccugcaggacgccuuccagcugcgcuaccucgaccugagcuccaacaagauccagaugauccagaagaccagcuuccccgagaacguccugaacaaccucaagaugcugcugcuccaccacaaccgguuccugugcacgugcgacgccgugugguucguguggugggucaaccacaccgaggugaccauccccuaccuggccaccgacgugaccugcgucggcccgggggcccacaagggccaguccgugaucagccucgaccuguacacgugcgagcuggaccucaccaaccugauccuguucucccucagcaucuccgugagccuguuccugauggucaugaugaccgcgagccaccucuacuucugggacgugugguacaucuaccacuucugcaaggccaagaucaagggcuaccagcgccugaucucccccgacugcugcuacgacgccuucaucguguacgacaccaaggaccccgccgucaccgagugggugcuggccgagcucguggcgaagcuggaggacccccgggagaagcacuucaaccugugccuggaggagcgcgacuggcucccggggcagcccguccuggagaaccugagccaguccauccagcucagcaagaagacgguguucgugaugaccgacaaguacgccaagaccgagaacuucaagaucgccuucuaccugucccaccagcggcugauggacgagaaggucgacgugaucauccucaucuuccuggagaagcccuuccagaaguccaaguuccugcagcuccgcaagcggcugugcggcagcagcgugcuggaguggcccaccaacccgcaggcccaccccuacuucuggcagugccucaagaacgcgcuggccacggacaaccacgucgccuacucccagguguucaaggagaccguguga

SEQ ID NO: 9763 - RNA, 3150 nt, Artificial Sequence
  derived and/or modified sequence opt2 from TLR7__Homo_sapiens__AAZ99022
auggucuuccccauguggacccucaagcgccagauccucauccucuucaacaucauccucaucuccaagcuccucggcgcccgcugguuccccaagacccuccccugcgacgucacccucgacguccccaagaaccacgucaucgucgacugcaccgacaagcaccucaccgagauccccggcggcauccccaccaacaccaccaaccucacccucaccaucaaccacauccccgacaucucccccgccuccuuccaccgccucgaccaccucgucgagaucgacuuccgcugcaacugcguccccaucccccucggcuccaagaacaacaugugcaucaagcgccuccagaucaagccccgcuccuucuccggccucaccuaccucaagucccucuaccucgacggcaaccagcuccucgagaucccccagggccucccccccucccuccagcuccucucccucgaggccaacaacaucuucuccauccgcaaggagaaccucaccgagcucgccaacaucgagauccucuaccucggccagaacugcuacuaccgcaaccccugcuacgucuccuacuccaucgagaaggacgccuuccucaaccucaccaagcucaagguccucucccucaaggacaacaacgucaccgccguccccaccguccuccccuccacccucaccgagcucuaccucuacaacaacaugaucgccaagauccaggaggacgacuucaacaaccucaaccagcuccagauccucgaccucuccggcaacugcccccgcugcuacaacgcccccuuccccugcgcccccugcaagaacaacuccccccuccagauccccgucaacgccuucgacgcccucaccgagcucaagguccuccgccuccacuccaacucccuccagcacguccccccccgcugguucaagaacaucaacaagcuccaggagcucgaccucucccagaacuuccucgccaaggagaucggcgacgccaaguuccuccacuuccuccccucccucauccagcucgaccucuccuucaacuucgagcuccaggucuaccgcgccuccaugaaccucucccaggccuucuccucccucaagucccucaagauccuccgcauccgcggcuacgucuucaaggagcucaaguccuucaaccucuccccccuccacaaccuccagaaccucgagguccucgaccucggcaccaacuucaucaagaucgccaaccucuccauguucaagcaguucaagcgccucaaggucaucgaccucuccgucaacaagaucucccccuccggcgacuccuccgaggucggcuucugcuccaacgcccgcaccuccgucgaguccuacgagccccagguccucgagcagcuccacuacuuccgcuacgacaaguacgcccgcuccugccgcuucaagaacaaggaggccuccuucauguccgucaacgaguccugcuacaaguacggccagacccucgaccucuccaagaacuccaucuucuucgucaaguccuccgacuuccagcaccucuccuuccucaagugccucaaccucuccggcaaccucaucucccagacccucaacggcuccgaguuccagccccucgccgagcuccgcuaccucgacuucuccaacaaccgccucgaccuccuccacuccaccgccuucgaggagcuccacaagcucgagguccucgacaucuccuccaacucccacuacuuccaguccgagggcaucacccacaugcucaacuucaccaagaaccucaagguccuccagaagcucaugaugaacgacaacgacaucuccuccuccaccucccgcaccauggaguccgagucccuccgcacccucgaguuccgcggcaaccaccucgacguccucuggcgcgagggcgacaaccgcuaccuccagcucuucaagaaccuccucaagcucgaggagcucgacaucuccaagaacucccucuccuuccuccccuccggcgucuucgacggcaugccccccaaccucaagaaccucucccucgccaagaacggccucaaguccuucuccuggaagaagcuccagugccucaagaaccucgagacccucgaccucucccacaaccagcucaccaccguccccgagcgccucuccaacugcucccgcucccucaagaaccucauccucaagaacaaccagauccgcucccucaccaaguacuuccuccaggacgccuuccagcuccgcuaccucgaccucuccuccaacaagauccagaugauccagaagaccuccuuccccgagaacguccucaacaaccucaagaugcuccuccuccaccacaaccgcuuccucugcaccugcgacgccgucugguucgucuggugggucaaccacaccgaggucaccauccccuaccucgccaccgacgucaccugcgucggccccggcgcccacaagggccaguccgucaucucccucgaccucuacaccugcgagcucgaccucaccaaccucauccucuucucccucuccaucuccgucucccucuuccucauggucaugaugaccgccucccaccucuacuucugggacgucugguacaucuaccacuucugcaaggccaagaucaagggcuaccagcgccucaucucccccgacugcugcuacgacgccuucaucgucuacgacaccaaggaccccgccgucaccgaguggguccucgccgagcucgucgccaagcucgaggacccccgcgagaagcacuucaaccucugccucgaggagcgcgacuggcuccccggccagcccguccucgagaaccucucccaguccauccagcucuccaagaagaccgucuucgucaugaccgacaaguacgccaagaccgagaacuucaagaucgccuucuaccucucccaccagcgccucauggacgagaaggucgacgucaucauccucaucuuccucgagaagcccuuccagaaguccaaguuccuccagcuccgcaagcgccucugcggcuccuccguccucgaguggcccaccaacccccaggcccaccccuacuucuggcagugccucaagaacgcccucgccaccgacaaccacgucgccuacucccaggucuucaaggagaccgucuga

SEQ ID NO: 9764 - RNA, 3150 nt, Artificial Sequence
  derived and/or modified sequence opt3 from TLR7__Homo_sapiens__AAZ99022
augguguuccccauguggacccugaagagacagauccucauucuuuuuaacauaauccugauuagcaaauuguuaggcgccaggugguucccuaagacacugccaugcgacgucacucuagauguuccgaaaaaucacgugaucguagacuguacggauaagcaucucaccgagauucccgggggaaucccuacaaacacuaccaaucugacacuuaccauaaaccacaucccagacauuucccccgcuucuuuucaucggcuggaucacuugguggaaaucgacuuccgcugcaauugugucccuauuccacucgguagcaaaaacaauaugugcaucaagcgacugcaaauaaagccccguaguuuuagcggccugacuuaccucaaauccuuauaucuggaugggaaccagcuuuuggagauuccucagggacugccaccgucucuacagcuccugucgcuugaagcaaauaacaucuucucaauuagaaaggagaaucugacagaauuggccaacaucgagauccucuaccugggccaaaauuguuauuacaggaaccccugcuaugugagcuacaguauugagaaagacgcguuuuuaaaucugaccaagcucaaaguucuuucccugaaggauaacaacgugacggcugucccuacuguguugccaucuacccuaacagaacuguaucucuacaauaacaugauagccaagauccaggaggacgauuucaauaaccugaaucagcuucagauucuggacuugagcgguaacuguccccggugcuacaaugcaccuuuuccaugugcccccugcaaaaacaauuccccgcuccaaaucccuguaaacgcuuucgaugcacugacugaauuaaagguucugcgccuacauucaaauagucuccagcacgugcccccaagaugguuuaaaaacauaaauaagcugcaggagcuugacuugagccagaacuuccuggccaaagagauuggggacgcuaaguuucuccacuuccugccuucucuuauccaacuggauuuguccuucaauuuugaacuccaggucuauagggccucaaugaaccugagccaggcguucaguucuuuaaaaucccugaagauccuacggauucgcggauacguguuuaaggagcucaaaucauucaaccugucgccccuucauaauuugcaaaaccuggaagugcucgaccugggcaccaauuuuaucaagauugcaaacuuaucuauguucaaacaguuuaagcgacugaaagucauagaucuuuccguuaauaagaucucaccaaguggcgacagcuccgaggugggguucuguucuaacgccagaacaagcguagaaucauaugagccccagguguuggagcagcuccacuacuuuagguaugauaaguacgcucggaguugccguuucaaaaauaaggaagccuccuuuaugagcgucaacgagucuugcuauaaauacggacaaacccuggaccuaucaaagaauaguauuuucuuugugaaaagcuccgauuuccagcaucugucuuuccucaagugucugaaccuuucggguaauuugaucagccagacgcugaacggcuccgaauuucagccuuuagcagagcuccgcuaccuggacuucucaaauaacagacuugaucuguugcacaguacugcuuuugaagaacuccacaagcuggagguucuagacaucucuagcaauucccauuauuuccaaucagaagggauuacacacaugcugaacuuuaccaaaaaccucaaggugcugcagaaacuuaugaugaaugauaacgacauaaguucuuccacuagcaggacaauggagagcgaaucuuugcggacccuggaguuccgaggaaaucauuuagacguccucuggcgcgaaggcgauaacagauaccugcagcuuuuuaagaaucugcuaaaacucgaggagcuggacaucuccaagaacucauugaguuuccugccaagcgguguguuugaugggaugccgcccaauuuaaagaaccucucgcuggccaaaaauggacuuaaguccuucucuuggaaaaagcugcagugcuugaaaaaccucgaaacgcuggaccuaagccacaaucaacugaccacaguaccugagaggcuuucaaacuguagucggucccucaagaaucugauuuugaaaaacaaucagauccgcucucugacuaaguacuuuuuacaggaugcguuccagcucagauaucuggaccuuagcuccaacaagauucaaaugauccagaaaaccucauuuccagaaaacguucugaauaacuugaagaugcuccugcuacaucacaauagguuccugugcacaugugaugccgugugguucgucuggugggugaaccacacugaggucaccauacccuaucuugcaacagacgugaccugcguuggcccuggcgcucauaaagggcagagcgugaucagucucgaucuguacacuugugaguuggacuuaacgaaucugauucucuuuucucuguccaucagcguaucgcuuuuccugauggucaugaugacagccucacacuuguauuuuugggaugugugguacauuuaccauuucugcaaggcuaaaaucaagggauaucaacgucuaauaucuccagacuguugcuacgaugccuuuauuguuuaugacaccaaggaccccgcagugacugaauggguccuggccgagcucguggcuaaacuggaagauccgcgggagaagcacuucaaccuuuguuuagaggagcgagacuggcugccuggucagccaguacucgagaauuugagucaguccauccagcugagcaaaaagaccguguuuguuaugacagauaaauacgcgaagaccgaaaacuucaagauugcauuuuaucucucucaccaaagacugauggacgagaaagucgaugugaucauacuuaucuuccuggaaaagcccuuucagaaaagcaaguucuugcagcuaaggaaacgccugugcggcuccucagugcucgaguggccuacuaauccccaggcccauccauacuucuggcaaugcuuaaagaacgcucuggccacagacaaucacgucgcauauagucagguuuuuaaggaaacgguguga

SEQ ID NO: 9765 - RNA, 3150 nt, Artificial Sequence
  derived and/or modified sequence opt4 from TLR7__Homo_sapiens__AAZ99022
augguguuccccauguggacccugaagagacagauccugauccuguucaacaucauccugaucagcaagcugcugggcgccagaugguuccccaagacccugcccugcgacgugacccuggacgugcccaagaaccacgugaucguggacugcaccgacaagcaccugaccgagauccccggcggcauccccaccaacaccaccaaccugacccugaccaucaaccacauccccgacaucagccccgccagcuuccacagacuggaccaccugguggagaucgacuucagaugcaacugcgugcccaucccccugggcagcaagaacaacaugugcaucaagagacugcagaucaagcccagaagcuucagcggccugaccuaccugaagagccuguaccuggacggcaaccagcugcuggagaucccccagggccugccccccagccugcagcugcugagccuggaggccaacaacaucuucagcaucagaaaggagaaccugaccgagcuggccaacaucgagauccuguaccugggccagaacugcuacuacagaaaccccugcuacgugagcuacagcaucgagaaggacgccuuccugaaccugaccaagcugaaggugcugagccugaaggacaacaacgugaccgccgugcccaccgugcugcccagcacccugaccgagcuguaccuguacaacaacaugaucgccaagauccaggaggacgacuucaacaaccugaaccagcugcagauccuggaccugagcggcaacugccccagaugcuacaacgcccccuuccccugcgcccccugcaagaacaacagcccccugcagauccccgugaacgccuucgacgcccugaccgagcugaaggugcugagacugcacagcaacagccugcagcacgugccccccagaugguucaagaacaucaacaagcugcaggagcuggaccugagccagaacuuccuggccaaggagaucggcgacgccaaguuccugcacuuccugcccagccugauccagcuggaccugagcuucaacuucgagcugcagguguacagagccagcaugaaccugagccaggccuucagcagccugaagagccugaagauccugagaaucagaggcuacguguucaaggagcugaagagcuucaaccugagcccccugcacaaccugcagaaccuggaggugcuggaccugggcaccaacuucaucaagaucgccaaccugagcauguucaagcaguucaagagacugaaggugaucgaccugagcgugaacaagaucagccccagcggcgacagcagcgaggugggcuucugcagcaacgccagaaccagcguggagagcuacgagccccaggugcuggagcagcugcacuacuucagauacgacaaguacgccagaagcugcagauucaagaacaaggaggccagcuucaugagcgugaacgagagcugcuacaaguacggccagacccuggaccugagcaagaacagcaucuucuucgugaagagcagcgacuuccagcaccugagcuuccugaagugccugaaccugagcggcaaccugaucagccagacccugaacggcagcgaguuccagccccuggccgagcugagauaccuggacuucagcaacaacagacuggaccugcugcacagcaccgccuucgaggagcugcacaagcuggaggugcuggacaucagcagcaacagccacuacuuccagagcgagggcaucacccacaugcugaacuucaccaagaaccugaaggugcugcagaagcugaugaugaacgacaacgacaucagcagcagcaccagcagaaccauggagagcgagagccugagaacccuggaguucagaggcaaccaccuggacgugcuguggagagagggcgacaacagauaccugcagcuguucaagaaccugcugaagcuggaggagcuggacaucagcaagaacagccugagcuuccugcccagcggcguguucgacggcaugccccccaaccugaagaaccugagccuggccaagaacggccugaagagcuucagcuggaagaagcugcagugccugaagaaccuggagacccuggaccugagccacaaccagcugaccaccgugcccgagagacugagcaacugcagcagaagccugaagaaccugauccugaagaacaaccagaucagaagccugaccaaguacuuccugcaggacgccuuccagcugagauaccuggaccugagcagcaacaagauccagaugauccagaagaccagcuuccccgagaacgugcugaacaaccugaagaugcugcugcugcaccacaacagauuccugugcaccugcgacgccgugugguucguguggugggugaaccacaccgaggugaccauccccuaccuggccaccgacgugaccugcgugggccccggcgcccacaagggccagagcgugaucagccuggaccuguacaccugcgagcuggaccugaccaaccugauccuguucagccugagcaucagcgugagccuguuccugauggugaugaugaccgccagccaccuguacuucugggacgugugguacaucuaccacuucugcaaggccaagaucaagggcuaccagagacugaucagccccgacugcugcuacgacgccuucaucguguacgacaccaaggaccccgccgugaccgagugggugcuggccgagcugguggccaagcuggaggaccccagagagaagcacuucaaccugugccuggaggagagagacuggcugcccggccagcccgugcuggagaaccugagccagagcauccagcugagcaagaagaccguguucgugaugaccgacaaguacgccaagaccgagaacuucaagaucgccuucuaccugagccaccagagacugauggacgagaagguggacgugaucauccugaucuuccuggagaagcccuuccagaagagcaaguuccugcagcugagaaagagacugugcggcagcagcgugcuggaguggcccaccaacccccaggcccaccccuacuucuggcagugccugaagaacgcccuggccaccgacaaccacguggccuacagccagguguucaaggagaccguguga

SEQ ID NO: 9766 - RNA, 3150 nt, Artificial Sequence
  derived and/or modified sequence opt5 from TLR7__Homo_sapiens__AAZ99022
augguguuccccauguggacccugaagagacagauccucauucuguuuaacaucauucuuaucagcaaacugcucggcgcccggugguucccuaagacacugccgugcgacgucacgcuugauguucccaaaaaucacgugauuguggacuguaccgauaagcaucugacagagaucccugggggaauccccaccaacacaaccaaucucacacugaccauuaaccacaucccugacauuucccccgcuucuuuucaucgccuggaucaccucgucgaaaucgacuucagaugcaauugugugccuauuccgcugggcagcaaaaacaauaugugcaucaagcggcuucaaauuaagccccgcuccuuuucugggcugacguaccucaaaagccuguaucuugauggaaaccagcugcucgagaucccucagggccugcccccuucccugcagcuccugucucuugaagccaauaacaucuucagcauuagaaaggagaaucugaccgaacucgcgaacaucgagauucuguaccuugggcaaaauuguuauuaccggaaccccugcuauguuuccuacagcaucgagaaagacgcuuuucugaaucucacaaagcugaaagugcugucucucaaggauaacaacgucaccgccgugccgacaguucugccuuccacccuuacggaacuguaucucuacaauaacaugauugccaagauccaggaggacgauuucaauaaccugaaucagcuucagauccuggaccucagcggaaacuguccccgcugcuacaaugcuccuuuucccugugcccccugcaaaaacaauucuccucugcaaauuccggugaacgcuuucgaugcccugacagaacucaagguccugagacuucauuccaauagccugcagcacgugcccccucggugguuuaaaaacaucaauaagcuccaggagcuggaccugucucagaacuuccuugcgaaagagauuggcgacgccaaguuucuccacuuccugcccucccugauccaacucgaucugagcuucaauuuugaacuucagguguaucgcgcuuccaugaaccugucucaggccuucagcucccucaaaagccugaagauucugagaauccggggcuacgucuuuaaggagcuuaaaucuuucaaccucuccccucugcauaaucugcaaaaccucgaaguucuggaccuugggaccaauuuuaucaagauugcuaaccugagcauguucaaacaguuuaagcgccucaaagugaucgaucugucugugaauaagauuagccccuccggagacucuagcgaggucggcuucuguuccaacgccagaacaagcguggaaucuuaugagccgcagguucuggagcagcuucacuacuuucgguaugauaaguacgcgcgcuccugcagauucaaaaauaaggaagccagcuuuaugucugugaacgaguccugcuauaaauacgggcaaacccucgaccugagcaaaaauuccaucuucuuugucaagucuagcgauuuccagcaucuguccuuccucaagugucugaaccuuucuggaaaucugauuagccagacccucaacggcuccgaauuucagccucuggcugagcugcgguaccuugacuucagcaauaacagacucgaucugcugcacucuacagccuuugaagaacuccacaagcuggaggugcuugacaucuccagcaauucucauuauuuccaauccgaagggauuacgcacaugcugaacuuuaccaaaaaccucaagguucugcagaaacugaugaugaaugauaacgacaucagcucuagcacaucccgcaccauggagagcgaaucucuucggacacuggaguucagaggaaaucaucucgacgugcuguggcgcgaaggcgauaaccgguaccuccagcuguuuaagaaucuucugaaacucgaggagcuggacaucuccaagaacagccuguccuuccuucccucuggcgucuuugaugggaugccucccaaucugaagaaccucagccuggcuaaaaauggacucaaguccuucucuuggaaaaagcugcagugccuuaaaaaccuggaaacccucgaccugagccacaaucaacugacgacagugccugagagacuuuccaacuguucucgcagccugaagaaucucauucugaaaaacaaucagauccggucccucaccaaguauuuucugcaggaugccuuccagcuuagauaccuggaccugagcucuaacaagauucaaaugauccagaaaaccuccuuucccgaaaacguccucaauaaccugaagaugcuucugcuccaucacaaucgcuuccugugcacaugugaugccgugugguucguuuggugggugaaccacaccgaggucacaauuccguaucucgcuacggacgugaccugcguuggcccuggggcgcauaaaggacagagcgugaucucucuggaucuuuacacaugugagcuggaccugaccaaucucauccuguuuucccuuagcauuucugucucccuguuccucauggugaugaugacagccagccaccuguauuuuugggaugugugguacaucuaccauuucugcaaggcuaaaauuaagggcuaucaacggcucaucucccccgacuguugcuacgaugccuuuauuguuuaugacaccaaggaccccgccgucacggaaugggugcuggcugagcuuguggccaaacuggaagauccuagagagaagcacuucaaccugugucucgaggagcgcgacuggcugccggggcagcccguccuugagaaucugagccagucuauccagcucagcaaaaagaccguguuuguuaugacagauaaauacgcgaagaccgaaaacuucaagaucgcuuuuuaucugucccaccaacggcucauggacgagaaaguggaugucauuauccugauuuuccuugaaaagccuuuucagaaaucuaaguuccugcagcugagaaaacggcucugcggaagcuccgugcuggaguggcccacaaauccucaggcccaucccuacuucuggcaaugccuuaagaacgcccuggcuaccgacaaucacguugccuauucucagguguuuaaggaaacggucuga

SEQ ID NO: 9767 - protein, 1049 aa, Artificial Sequence [sequence omitted]

SEQ ID NO: 9768 - RNA, 3150 nt, Artificial Sequence
  TLR7__Homo_sapiens__AAZ99025
augguguuuccaauguggacacugaagagacuaauucuuauccuuuuuaacauaauccuaauuuccaaacuccuuggggcuagaugguuuccuaaaacucugcccugugaugucacucuggauguuccaaagaaccaugugaucguggacugcacagacaagcauuugacagaaauuccuggagguauucccacgaacaccacgaaccucacccucaccauuaaccacauaccagacaucuccccagcguccuuucacagacuggaccaucugguagagaucgauuucagaugcaacuguguaccuauuccacuggggucaaaaaacaacaugugcaucaagaggcugcagauuaaacccagaagcuuuaguggacucacuuauuuaaaaucccuuuaccuggauggaaaccagcuacuagagauaccgcagggccucccgccuagcuuacagcuucucagccuugaggccaacaacaucuuuuccaucagaaaagagaaucuaacagaacuggccaacauagaaauacucuaccugggccaaaacuguuauuaucgaaauccuuguuauguuucauauucaauagagaaagaugccuuccuaaacuugacaaaguuaaaagugcucucccugaaagauaacaaugucacagccgucccuacuguuuugccaucuacuuuaacagaacuauaucucuacaacaacaugauugcaaaaauccaagaagaugauuuuaauaaccucaaccaauuacaaauucuugaccuaaguggaaauugcccucguuguuauaaugccccauuuccuugugcgccguguaaaaauaauucuccccuacagaucccuguaaaugcuuuugaugcgcugacagaauuaaaaguuuuacgucuacacaguaacucucuucagcaugugcccccaagaugguuuaagaacaucaacaaacuccaggaacuggaucugucccaaaacuucuuggccaaagaaauuggggaugcuaaauuucugcauuuucuccccagccucauccaauuggaucugucuuucaauuuugaacuucaggucuaucgugcaucuaugaaucuaucacaagcauuuucuucacugaaaagccugaaaauucugcggaucagaggauaugucuuuaaagaguugaaaagcuuuaaccucucgccauuacauaaucuucaaaaucuugaaguucuugaucuuggcacuaacuuuauaaaaauugcuaaccucagcauguuuaaacaauuuaaaagacugaaagucauagaucuuucagugaauaaaauaucaccuucaggagauucaagugaaguuggcuucugcucaaaugucagaacuucuguagaaaguuaugaaccccagguccuggaacaauuacauuauuucagauaugauaaguaugcaaggaguugcagauucaaaaacaaagaggcuucuuucaugucuguuaaugaaagcugcuacaaguaugggcagaccuuggaucuaaguaaaaauaguauauuuuuugucaaguccucugauuuucagcaucuuucuuuccucaaaugccugaaucugucaggaaaucucauuagccaaacucuuaauggcagugaauuccaaccuuuagcagagcugagauauuuggacuucuccaacaaccggcuugauuuacuccauucaacagcauuugaagagcuucacaaacuggaaguucuggauauaagcaguaauagccauuauuuucaaucagaaggaauuacucauaugcuaaacuuuaccaagaaccuaaagguucugcagaaacugaugaugaacgacaaugacaucucuuccuccaccagcaggaccauggagagugagucucuuagaacucuggaauucagaggaaaucacuuagauguuuuauggagagaaggugauaacagauacuuacaauuauucaagaaucugcuaaaauuagaggaauuagacaucucuaaaaauucccuaaguuucuugccuucuggaguuuuugaugguaugccuccaaaucuaaagaaucucucuuuggccaaaaaugggcucaaaucuuucaguuggaagaaacuccagugucuaaagaaccuggaaacuuuggaccucagccacaaccaacugaccacugucccugagagauuauccaacuguuccagaagccucaagaaucugauucuuaagaauaaucaaaucaggagucugacgaaguauuuucuacaagaugccuuccaguugcgauaucuggaucucagcucaaauaaaauccagaugauccaaaagaccagcuucccagaaaauguccucaacaaucugaagauguugcuuuugcaucauaaucgguuucugugcaccugugaugcugugugguuugucugguggguuaaccauacggaggugacuauuccuuaccuggccacagaugugacuuguguggggccaggagcacacaagggccaaagugugaucucccuggaucuguacaccugugaguuagaucugacuaaccugauucuguucucacuuuccauaucuguaucucucuuucucauggugaugaugacagcaagucaccucuauuucugggaugugugguauauuuaccauuucuguaaggccaagauaaagggguaucagcgucuaauaucaccagacuguugcuaugaugcuuuuauuguguaugacacuaaagacccagcugugaccgaguggguuuuggcugagcugguggccaaacuggaagacccaagagagaaacauuuuaauuuaugucucgaggaaagggacugguuaccagggcagccaguucuggaaaaccuuucccagagcauacagcuuagcaaaaagacaguguuugugaugacagacaaguaugcaaagacugaaaauuuuaagauagcauuuuacuugucccaucagaggcucauggaugaaaaaguugaugugauuaucuugauauuucuugagaagcccuuucagaaguccaaguuccuccagcuccggaaaaggcucugugggaguucuguccuugaguggccaacaaacccgcaagcucacccauacuucuggcagugucuaaagaacgcccuggccacagacaaucauguggccuauagucagguguucaaggaaacggucuag

SEQ ID NO: 9769 - RNA, 3150 nt, Artificial Sequence
  derived and/or modified sequence opt1 from TLR7__Homo_sapiens__AAZ99025
augguguuccccauguggacccugaagcgccucauccugauccuguucaacaucauccucaucagcaagcugcugggcgcccggugguucccgaagacccuccccugcgacgucacgcuggacgugcccaagaaccacgugaucgucgacugcaccgacaagcaccugaccgagauccccgggggcaucccgaccaacacgaccaaccucacccugaccaucaaccacauccccgacaucucccccgccagcuuccaccgccuggaccaccucguggagaucgacuuccggugcaacugcgugcccaucccgcugggguccaagaacaacaugugcaucaagcgccugcagaucaagccccggagcuucuccggccucacguaccucaagagccuguaccucgacgggaaccagcugcuggagaucccccagggccugcccccgucccugcagcugcucagccuggaggcgaacaacaucuucuccauccgcaaggagaaccugaccgagcucgccaacaucgagauccuguaccugggccagaacugcuacuaccggaaccccugcuacgucagcuacuccaucgagaaggacgccuuccucaaccugaccaagcugaaggugcucagccugaaggacaacaacgugaccgccguccccacggugcugcccuccacccucaccgagcuguaccuguacaacaacaugaucgccaagauccaggaggacgacuucaacaaccucaaccagcugcagauccuggaccucagcgggaacugcccgcgcugcuacaacgcgcccuuccccugcgcccccugcaagaacaacuccccgcugcagauccccgugaacgccuucgacgcccugaccgagcucaagguccugcggcugcacagcaacucccuccagcacgugccgccccgcugguucaagaacaucaacaagcugcaggagcuggaccugagccagaacuuccucgcgaaggagaucggcgacgccaaguuccugcacuuccugcccucccucauccagcuggaccugagcuucaacuucgagcuccagguguaccgggccagcaugaaccugucccaggccuucagcucccucaagagccugaagauccugcgcauccggggguacgucuucaaggagcugaaguccuucaaccucagcccccugcacaaccugcagaaccucgaggugcuggaccugggcacgaacuucaucaagaucgccaaccucuccauguucaagcaguucaagcgccugaaggugaucgaccugagcgucaacaagaucucccccagcggggacuccagcgaggugggcuucugcuccaacgugcggaccagcgucgaguccuacgagccccaggugcucgagcagcugcacuacuuccgcuacgacaaguacgcgcggagcugccgcuucaagaacaaggaggccuccuucaugagcgugaacgaguccugcuacaaguacggccagacccuggaccucagcaagaacagcaucuucuucgucaaguccagcgacuuccagcaccuguccuuccugaagugccucaaccugagcgggaaccugaucucccagacccucaacggcagcgaguuccagccgcuggccgagcugcgguaccucgacuucuccaacaaccgccuggaccugcuccacagcacggccuucgaggagcugcacaagcuggaggugcucgacaucuccagcaacucccacuacuuccagagcgaggggaucacccacaugcugaacuucaccaagaaccugaagguccuccagaagcugaugaugaacgacaacgacaucuccagcuccaccagccggacgauggaguccgagagccugcgcacccucgaguuccgcggcaaccaccuggacgugcuguggcgggagggcgacaaccgcuaccuccagcuguucaagaaccugcucaagcuggaggagcuggacaucagcaagaacucccucagcuuccugcccuccgggguguucgacggcaugcccccgaaccugaagaaccucagccuggccaagaacgggcugaaguccuucagcuggaagaagcuccagugccugaagaaccuggagacccucgaccugucccacaaccagcugaccacgguccccgagcggcucagcaacugcucccgcagccugaagaaccugauccucaagaacaaccagauccggucccugaccaaguacuuccugcaggacgcguuccagcuccgcuaccuggaccugagcuccaacaagauccagaugauccagaagaccagcuuccccgagaacgugcucaacaaccugaagaugcugcuccugcaccacaaccgguuccugugcacgugcgacgccgugugguucgucuggugggugaaccacaccgaggugaccauccccuaccucgccaccgacgugaccugcgucggcccgggggcccacaagggccaguccgugaucagccuggaccuguacacgugcgagcucgaccugaccaaccugauccucuucucccugagcaucuccgucagccuguuccucauggugaugaugaccgccagccaccuguacuucugggacgugugguacaucuaccacuucugcaaggcgaagaucaagggcuaccagcgccugaucucccccgacugcugcuacgacgccuucaucgucuacgacaccaaggaccccgccgugaccgagugggugcucgccgagcuggucgccaagcuggaggacccccgggagaagcacuucaaccugugccucgaggagcgcgacuggcugccggggcagcccgugcuggagaaccucagccaguccauccagcugagcaagaagacgguguucgucaugaccgacaaguacgcgaagaccgagaacuucaagaucgccuucuaccugucccaccagcggcucauggacgagaagguggacgugaucauccugaucuuccuggagaagcccuuccagaaguccaaguuccuccagcugcgcaagcggcugugcggcagcagcguccucgaguggcccaccaacccgcaggcccaccccuacuucuggcagugccugaagaacgcccuggcgacggacaaccacguggccuacucccagguguucaaggagaccgucuga

SEQ ID NO: 9770 - RNA, 3150 nt, Artificial Sequence
  derived and/or modified sequence opt2 from TLR7__Homo_sapiens__AAZ99025
auggucuuccccauguggacccucaagcgccucauccucauccucuucaacaucauccucaucuccaagcuccucggcgcccgcugguuccccaagacccuccccugcgacgucacccucgacguccccaagaaccacgucaucgucgacugcaccgacaagcaccucaccgagauccccggcggcauccccaccaacaccaccaaccucacccucaccaucaaccacauccccgacaucucccccgccuccuuccaccgccucgaccaccucgucgagaucgacuuccgcugcaacugcguccccaucccccucggcuccaagaacaacaugugcaucaagcgccuccagaucaagccccgcuccuucuccggccucaccuaccucaagucccucuaccucgacggcaaccagcuccucgagaucccccagggccucccccccucccuccagcuccucucccucgaggccaacaacaucuucuccauccgcaaggagaaccucaccgagcucgccaacaucgagauccucuaccucggccagaacugcuacuaccgcaaccccugcuacgucuccuacuccaucgagaaggacgccuuccucaaccucaccaagcucaagguccucucccucaaggacaacaacgucaccgccguccccaccguccuccccuccacccucaccgagcucuaccucuacaacaacaugaucgccaagauccaggaggacgacuucaacaaccucaaccagcuccagauccucgaccucuccggcaacugcccccgcugcuacaacgcccccuuccccugcgcccccugcaagaacaacuccccccuccagauccccgucaacgccuucgacgcccucaccgagcucaagguccuccgccuccacuccaacucccuccagcacguccccccccgcugguucaagaacaucaacaagcuccaggagcucgaccucucccagaacuuccucgccaaggagaucggcgacgccaaguuccuccacuuccuccccucccucauccagcucgaccucuccuucaacuucgagcuccaggucuaccgcgccuccaugaaccucucccaggccuucuccucccucaagucccucaagauccuccgcauccgcggcuacgucuucaaggagcucaaguccuucaaccucuccccccuccacaaccuccagaaccucgagguccucgaccucggcaccaacuucaucaagaucgccaaccucuccauguucaagcaguucaagcgccucaaggucaucgaccucuccgucaacaagaucucccccuccggcgacuccuccgaggucggcuucugcuccaacguccgcaccuccgucgaguccuacgagccccagguccucgagcagcuccacuacuuccgcuacgacaaguacgcccgcuccugccgcuucaagaacaaggaggccuccuucauguccgucaacgaguccugcuacaaguacggccagacccucgaccucuccaagaacuccaucuucuucgucaaguccuccgacuuccagcaccucuccuuccucaagugccucaaccucuccggcaaccucaucucccagacccucaacggcuccgaguuccagccccucgccgagcuccgcuaccucgacuucuccaacaaccgccucgaccuccuccacuccaccgccuucgaggagcuccacaagcucgagguccucgacaucuccuccaacucccacuacuuccaguccgagggcaucacccacaugcucaacuucaccaagaaccucaagguccuccagaagcucaugaugaacgacaacgacaucuccuccuccaccucccgcaccauggaguccgagucccuccgcacccucgaguuccgcggcaaccaccucgacguccucuggcgcgagggcgacaaccgcuaccuccagcucuucaagaaccuccucaagcucgaggagcucgacaucuccaagaacucccucuccuuccuccccuccggcgucuucgacggcaugccccccaaccucaagaaccucucccucgccaagaacggccucaaguccuucuccuggaagaagcuccagugccucaagaaccucgagacccucgaccucucccacaaccagcucaccaccguccccgagcgccucuccaacugcucccgcucccucaagaaccucauccucaagaacaaccagauccgcucccucaccaaguacuuccuccaggacgccuuccagcuccgcuaccucgaccucuccuccaacaagauccagaugauccagaagaccuccuuccccgagaacguccucaacaaccucaagaugcuccuccuccaccacaaccgcuuccucugcaccugcgacgccgucugguucgucuggugggucaaccacaccgaggucaccauccccuaccucgccaccgacgucaccugcgucggccccggcgcccacaagggccaguccgucaucucccucgaccucuacaccugcgagcucgaccucaccaaccucauccucuucucccucuccaucuccgucucccucuuccucauggucaugaugaccgccucccaccucuacuucugggacgucugguacaucuaccacuucugcaaggccaagaucaagggcuaccagcgccucaucucccccgacugcugcuacgacgccuucaucgucuacgacaccaaggaccccgccgucaccgaguggguccucgccgagcucgucgccaagcucgaggacccccgcgagaagcacuucaaccucugccucgaggagcgcgacuggcuccccggccagcccguccucgagaaccucucccaguccauccagcucuccaagaagaccgucuucgucaugaccgacaaguacgccaagaccgagaacuucaagaucgccuucuaccucucccaccagcgccucauggacgagaaggucgacgucaucauccucaucuuccucgagaagcccuuccagaaguccaaguuccuccagcuccgcaagcgccucugcggcuccuccguccucgaguggcccaccaacccccaggcccaccccuacuucuggcagugccucaagaacgcccucgccaccgacaaccacgucgccuacucccaggucuucaaggagaccgucuga

SEQ ID NO: 9771 - RNA, 3150 nt, Artificial Sequence
  derived and/or modified sequence opt3 from TLR7__Homo_sapiens__AAZ99025
augguguuccccauguggacccugaagagacucauccuuauucuguuuaacauaaucuugauuagcaaauuacugggcgccaggugguucccuaagacacuaccaugcgacgucacucucgauguuccgaaaaaucacgugaucguagacuguacggauaagcaucugaccgagauucccgggggaaucccuacaaacacuaccaaucuuacacugaccauaaaccacaucccagacauuucccccgcuucuuuucaucgguuggaucaccucguggaaaucgacuuccgcugcaauugugucccuauuccacuggguagcaaaaacaauaugugcaucaagcgacugcagauaaagccccguaguuuuagcggccucacuuacuuaaaaucccuguaucuugaugggaaccaauugcuggagauuccucagggacuaccaccgucucuccagcugcuuucgcuggaagcaaauaacaucuucucaauuagaaaggagaauuugacagaacucgccaacaucgagauccuguacuuaggccagaauuguuauuacaggaaccccugcuaugugagcuacaguauugagaaagacgcguuucugaaucucaccaaacuuaaaguucuguccuugaaggauaacaacgugacggcugucccuacugugcuaccaucuacccugacagaacucuaucuguacaauaacaugauagccaagauccaagaggacgauuucaauaaccuuaaucagcugcagauuuuggaccucagcgguaacuguccccggugcuacaaugcaccuuuuccaugugcccccugcaaaaacaauuccccgcugcagaucccuguaaacgcuuucgaugcauuaacugaacugaagguucuacgccuccauucaaauagucugcaacacgugcccccaagaugguuuaaaaacauaaauaaacuucaggaguuggaccugagccagaacuuccucgccaaagagauuggggacgcuaaguuucugcacuuccuuccuucucugauccaguuggaucucuccuucaauuuugaacugcaagucuauagggccucaaugaacuuaagccaggcguucaguucucugaaaucccuaaagauccuccggauucgcggauacguguuuaaggagcugaaaucauucaaccuuucgcccuugcauaaucugcagaaccucgaagugcuggacuuaggcaccaauuuuaucaagauugcaaaccugucuauguucaaacaauuuaagcgacuuaaagucauagauuuguccguuaauaagaucucaccaaguggcgacagcuccgaggugggguucuguucuaacguaagaacaagcguggaaucauaugagccccagguccucgagcagcugcacuacuuuagguaugauaaguacgcccggaguugccguuucaaaaauaaggaggcuuccuuuaugagcgugaacgaaucuugcuauaaauacggacagacccuagaccugucaaagaauaguauuuucuuuguuaaaagcuccgauuuccaacaucucucuuuccugaagugucuuaacuugucggguaaucugaucagccagacguuaaacggcuccgaauuucagccucucgccgagcugcgcuaccuugacuucucaaauaacagacuggauuugcuccacaguacugcauuugaggaacugcacaagcuagaggugcuggacaucucuagcaauucccauuauuuccagucagaagggauuacacacaugcucaacuuuaccaaaaaccugaagguccuucaaaaauugaugaugaaugauaacgacauaaguucuuccacuagcaggacaauggagagcgaaucucugcggaccuuagaguuccgaggaaaucaucucgacgugcuguggcgcgaaggcgauaacagauaccuucagcuguuuaagaaucuacucaaacuggaggaguuggacaucuccaagaacucacugaguuucuuaccaagcgguguauuugaugggaugccgcccaaucucaagaaccugucgcuugcuaaaaauggacugaaguccuucucuuggaaaaaguugcagugccucaaaaaccuggaaacgcuagaccugagccacaaucagcuuaccacaguuccugagaggcucucaaacuguagucggucccugaagaauuugauucugaaaaacaaucaaauccgcucuuuaacuaaguauuuucuccaggaugccuuccagcugagauaccuugaccugagcuccaacaagauucagaugauccaaaagaccucauuuccagaaaacguguugaauaaccucaagaugcugcuacugcaucacaauagguuccuuugcacaugugaugcggucugguucguguggugggucaaccacacugaggugaccauacccuaucucgccacagacguuaccugcgugggcccuggcgcacauaaagggcagagcguaaucagucuggauuuguacacuugugaguuagaccugacgaaucucauucuguuuucucuuuccaucagcgucucgcuguucuugauggugaugaugacagcuucacaccuauauuuuugggauguuugguacauuuaccauuucugcaaggccaaaaucaagggauaucagcgucugauaucuccagacuguugcuacgaugcuuuuauuguguaugacaccaaggaccccgccgucacugaaugggugcucgcagagcugguagccaaacuugaagauccgcgggagaagcacuucaacuuaugucuggaggaacgagacuggcucccuggucaaccaguguuggagaaucugagucaguccauccagcucagcaaaaagaccguuuuugucaugacagauaaauacgcuaagaccgaaaacuucaagauugcguuuuaucugucucaccagagacuuauggacgagaaaguggaugugaucauacugaucuucuuggaaaagcccuuucaaaagagcaaguuccuacagcugaggaaacgccucugcggcuccucagucuuagaguggccuacuaauccccaggcacauccauacuucuggcagugccugaagaacgcccuugcuacagacaaucacguugccuauagucaaguguuuaaggaaacgguguga

SEQ ID NO: 9772 - RNA, 3150 nt, Artificial Sequence
  derived and/or modified sequence opt4 from TLR7__Homo_sapiens__AAZ99025
augguguuccccauguggacccugaagagacugauccugauccuguucaacaucauccugaucagcaagcugcugggcgccagaugguuccccaagacccugcccugcgacgugacccuggacgugcccaagaaccacgugaucguggacugcaccgacaagcaccugaccgagauccccggcggcauccccaccaacaccaccaaccugacccugaccaucaaccacauccccgacaucagccccgccagcuuccacagacuggaccaccugguggagaucgacuucagaugcaacugcgugcccaucccccugggcagcaagaacaacaugugcaucaagagacugcagaucaagcccagaagcuucagcggccugaccuaccugaagagccuguaccuggacggcaaccagcugcuggagaucccccagggccugccccccagccugcagcugcugagccuggaggccaacaacaucuucagcaucagaaaggagaaccugaccgagcuggccaacaucgagauccuguaccugggccagaacugcuacuacagaaaccccugcuacgugagcuacagcaucgagaaggacgccuuccugaaccugaccaagcugaaggugcugagccugaaggacaacaacgugaccgccgugcccaccgugcugcccagcacccugaccgagcuguaccuguacaacaacaugaucgccaagauccaggaggacgacuucaacaaccugaaccagcugcagauccuggaccugagcggcaacugccccagaugcuacaacgcccccuuccccugcgcccccugcaagaacaacagcccccugcagauccccgugaacgccuucgacgcccugaccgagcugaaggugcugagacugcacagcaacagccugcagcacgugccccccagaugguucaagaacaucaacaagcugcaggagcuggaccugagccagaacuuccuggccaaggagaucggcgacgccaaguuccugcacuuccugcccagccugauccagcuggaccugagcuucaacuucgagcugcagguguacagagccagcaugaaccugagccaggccuucagcagccugaagagccugaagauccugagaaucagaggcuacguguucaaggagcugaagagcuucaaccugagcccccugcacaaccugcagaaccuggaggugcuggaccugggcaccaacuucaucaagaucgccaaccugagcauguucaagcaguucaagagacugaaggugaucgaccugagcgugaacaagaucagccccagcggcgacagcagcgaggugggcuucugcagcaacgugagaaccagcguggagagcuacgagccccaggugcuggagcagcugcacuacuucagauacgacaaguacgccagaagcugcagauucaagaacaaggaggccagcuucaugagcgugaacgagagcugcuacaaguacggccagacccuggaccugagcaagaacagcaucuucuucgugaagagcagcgacuuccagcaccugagcuuccugaagugccugaaccugagcggcaaccugaucagccagacccugaacggcagcgaguuccagccccuggccgagcugagauaccuggacuucagcaacaacagacuggaccugcugcacagcaccgccuucgaggagcugcacaagcuggaggugcuggacaucagcagcaacagccacuacuuccagagcgagggcaucacccacaugcugaacuucaccaagaaccugaaggugcugcagaagcugaugaugaacgacaacgacaucagcagcagcaccagcagaaccauggagagcgagagccugagaacccuggaguucagaggcaaccaccuggacgugcuguggagagagggcgacaacagauaccugcagcuguucaagaaccugcugaagcuggaggagcuggacaucagcaagaacagccugagcuuccugcccagcggcguguucgacggcaugccccccaaccugaagaaccugagccuggccaagaacggccugaagagcuucagcuggaagaagcugcagugccugaagaaccuggagacccuggaccugagccacaaccagcugaccaccgugcccgagagacugagcaacugcagcagaagccugaagaaccugauccugaagaacaaccagaucagaagccugaccaaguacuuccugcaggacgccuuccagcugagauaccuggaccugagcagcaacaagauccagaugauccagaagaccagcuuccccgagaacgugcugaacaaccugaagaugcugcugcugcaccacaacagauuccugugcaccugcgacgccgugugguucguguggugggugaaccacaccgaggugaccauccccuaccuggccaccgacgugaccugcgugggccccggcgcccacaagggccagagcgugaucagccuggaccuguacaccugcgagcuggaccugaccaaccugauccuguucagccugagcaucagcgugagccuguuccugauggugaugaugaccgccagccaccuguacuucugggacgugugguacaucuaccacuucugcaaggccaagaucaagggcuaccagagacugaucagccccgacugcugcuacgacgccuucaucguguacgacaccaaggaccccgccgugaccgagugggugcuggccgagcugguggccaagcuggaggaccccagagagaagcacuucaaccugugccuggaggagagagacuggcugcccggccagcccgugcuggagaaccugagccagagcauccagcugagcaagaagaccguguucgugaugaccgacaaguacgccaagaccgagaacuucaagaucgccuucuaccugagccaccagagacugauggacgagaagguggacgugaucauccugaucuuccuggagaagcccuuccagaagagcaaguuccugcagcugagaaagagacugugcggcagcagcgugcuggaguggcccaccaacccccaggcccaccccuacuucuggcagugccugaagaacgcccuggccaccgacaaccacguggccuacagccagguguucaaggagaccguguga

SEQ ID NO: 9773 - RNA, 3150 nt, Artificial Sequence
  derived and/or modified sequence opt5 from TLR7__Homo_sapiens__AAZ99025
augguguuccccauguggacccugaagagacucauccugauucuuuuuaacaucauucugaucagcaaacuccugggcgcccggugguucccuaagacacuuccgugcgacgucacgcuggauguucccaaaaaucacgugauuguggacuguaccgauaagcaucucacagagaucccugggggaauccccaccaacacaaccaaucugacacugaccauuaaccacaucccugacauuucccccgcuucuuuucaucgccucgaucaccuggucgaaaucgacuucagaugcaauugugugccuauuccgcuuggcagcaaaaacaauaugugcaucaagcggcugcagauuaagccccgcuccuuuucugggcucacguaccugaaaagccuuuaucuggauggaaaccaacuccuggagaucccucagggccugcccccuucccuccagcugcuuucucuggaagccaauaacaucuucagcauuagaaaggagaaucucaccgaacuggcgaacaucgagauucuuuaccuggggcagaauuguuauuaccggaaccccugcuauguuuccuacagcaucgagaaagacgcuuuucucaaucugacaaagcugaaagugcucucucugaaggauaacaacgucaccgccgugccgacaguucuuccuuccacccugacggaacucuaucuguacaauaacaugauugccaagauccaagaggacgauuucaauaaccuuaaucagcugcagauccucgaccugagcggaaacuguccccgcugcuacaaugcuccuuuucccugugcccccugcaaaaacaauucuccucugcagauuccggugaacgcuuucgaugcccucacagaacugaagguccuuagacugcauuccaauagccuccaacacgugcccccucggugguuuaaaaacaucaauaagcugcaggagcuggaccuuucucagaacuuccucgcgaaagagauuggcgacgccaaguuucugcacuuccugcccucccucauccagcuggaucuuagcuucaauuuugaacugcaaguguaucgcgcuuccaugaaccucucucaggccuucagcucccugaaaagccugaagauucuuagaauccggggcuacgucuuuaaggagcucaaaucuuucaaccuguccccucugcauaaucuccagaaccuggaaguucuugaccuggggaccaauuuuaucaagauugcuaaccucagcauguucaaacaauuuaagcgccugaaagugaucgaucugucugugaauaagauuagccccuccggagacucuagcgaggucggcuucuguuccaacgugagaacaagcguugaaucuuaugagccucaggugcuugagcagcuccacuacuuucgguaugauaaguacgcccgcuccugcagauucaaaaauaaggaagcgagcuuuaugucugucaacgaguccugcuauaaauacgggcagacccuggaccugagcaaaaauuccaucuucuuugugaaaucuagcgauuuccaacaucucuccuuccugaagugucuuaaccugucuggaaaucucauuagccagacccugaacggcuccgaauuucagccgcuggccgagcuucgguaccucgacuucagcaauaacagacuggaucugcuccacucuacagcuuuugaagaacugcacaaacuugagguucuggacaucuccagcaauucucauuauuuccaguccgaagggauuacgcacaugcucaacuuuaccaagaaccugaaggugcugcaaaaacuuaugaugaaugauaacgacaucagcucuagcacaucccgcaccauggagagcgaaucucugcggacacucgaguucagaggaaaucaucuggacguccucuggcgcgaaggcgauaaccgguaccugcagcuuuuuaagaaucugcucaaacuggaggagcuggacaucuccaagaacagccuuuccuuccugcccucuggcguguuugaugggaugccucccaaucucaagaaccugagccucgccaaaaauggacugaaguccuucucuuggaaaaagcugcagugccuuaaaaaccucgaaacccuggaccugagccacaaucagcuuacgacagucccugagagacuguccaacuguucucgcagccucaagaaucugauucucaaaaacaaucaaauccggucccugaccaaguauuuucuucaggaugcuuuccagcugagauaccuggaccucagcucuaacaagauucagaugauccaaaagaccuccuuucccgaaaacgugcugaauaaccuuaagaugcugcuccugcaucacaaucgcuuccucugcacaugugaugccguuugguucguguggugggucaaccacaccgaggugacaauuccguaucuggccacggacguuaccugcgugggcccuggggcucauaaaggacagagcgucaucucucuugaucuguacacaugugagcuggaccucaccaaucugauccuguuuucccuuagcauuucugugucccucuuccugauggugaugaugacagcgagccaccucuauuuuugggauguuugguacaucuaccauuucugcaaggccaaaauuaagggcuaucagcggcugaucucccccgacuguugcuacgaugcuuuuauugucuaugacaccaaggaccccgccgugacggaaugggugcuugccgagcuggucgcuaaacuggaagauccuagagagaagcacuucaaccucugucuggaggagcgcgacuggcuuccggggcaacccgugcuggagaaucucagccagucuauccagcugagcaaaaagaccguuuuugugaugacagauaaauacgccaagaccgaaaacuucaagaucgcguuuuaucucucccaccagcggcugauggacgagaaagucgaugugauuauccuuauuuuccuggaaaagccuuuucaaaaaucuaaguuccugcagcucagaaaacggcugugcggaagcuccguucuugaguggcccacaaauccucaggcucaucccuacuucuggcagugccugaagaacgcccucgccaccgacaaucacguggcuuauucucaagucuuuaaggaaacgguguga

SEQ ID NO: 9774 - protein, 1049 aa, Artificial Sequence; identical to SEQ ID NO: 9760
  TLR7__Homo_sapiens__Q9NYK1

SEQ ID NO: 9775 - RNA, 3150 nt, Artificial Sequence
  TLR7__Homo_sapiens__AAF60188
augguguuuccaauguggacacugaagagacaaauucuuauccuuuuuaacauaauccuaauuuccaaacuccuuggggcuagaugguuuccuaaaacucugcccugugaugucacucuggauguuccaaagaaccaugugaucguggacugcacagacaagcauuugacagaaauuccuggagguauucccacgaacaccacgaaccucacccucaccauuaaccacauaccagacaucuccccagcguccuuucacagacuggaccaucugguagagaucgauuucagaugcaacuguguaccuauuccacuggggucaaaaaacaacaugugcaucaagaggcugcagauuaaacccagaagcuuuaguggacucacuuauuuaaaaucccuuuaccuggauggaaaccagcuacuagagauaccgcagggccucccgccuagcuuacagcuucucagccuugaggccaacaacaucuuuuccaucagaaaagagaaucuaacagaacuggccaacauagaaauacucuaccugggccaaaacuguuauuaucgaaauccuuguuauguuucauauucaauagagaaagaugccuuccuaaacuugacaaaguuaaaagugcucucccugaaagauaacaaugucacagccgucccuacuguuuugccaucuacuuuaacagaacuauaucucuacaacaacaugauugcaaaaauccaagaagaugauuuuaauaaccucaaccaauuacaaauucuugaccuaaguggaaauugcccucguuguuauaaugccccauuuccuugugcgccguguaaaaauaauucuccccuacagaucccuguaaaugcuuuugaugcgcugacagaauuaaaaguuuuacgucuacacaguaacucucuucagcaugugcccccaagaugguuuaagaacaucaacaaacuccaggaacuggaucugucccaaaacuucuuggccaaagaaauuggggaugcuaaauuucugcauuuucuccccagccucauccaauuggaucugucuuucaauuuugaacuucaggucuaucgugcaucuaugaaucuaucacaagcauuuucuucacugaaaagccugaaaauucugcggaucagaggauaugucuuuaaagaguugaaaagcuuuaaccucucgccauuacauaaucuucaaaaucuugaaguucuugaucuuggcacuaacuuuauaaaaauugcuaaccucagcauguuuaaacaauuuaaaagacugaaagucauagaucuuucagugaauaaaauaucaccuucaggagauucaagugaaguuggcuucugcucaaaugccagaacuucuguagaaaguuaugaaccccagguccuggaacaauuacauuauuucagauaugauaaguaugcaaggaguugcagauucaaaaacaaagaggcuucuuucaugucuguuaaugaaagcugcuacaaguaugggcagaccuuggaucuaaguaaaaauaguauauuuuuugucaaguccucugauuuucagcaucuuucuuuccucaaaugccugaaucugucaggaaaucucauuagccaaacucuuaauggcagugaauuccaaccuuuagcagagcugagauauuuggacuucuccaacaaccggcuugauuuacuccauucaacagcauuugaagagcuucacaaacuggaaguucuggauauaagcaguaauagccauuauuuucaaucagaaggaauuacucauaugcuaaacuuuaccaagaaccuaaagguucugcagaaacugaugaugaacgacaaugacaucucuuccuccaccagcaggaccauggagagugagucucuuagaacucuggaauucagaggaaaucacuuagauguuuuauggagagaaggugauaacagauacuuacaauuauucaagaaucugcuaaaauuagaggaauuagacaucucuaaaaauucccuaaguuucuugccuucuggaguuuuugaugguaugccuccaaaucuaaagaaucucucuuuggccaaaaaugggcucaaaucuuucaguuggaagaaacuccagugucuaaagaaccuggaaacuuuggaccucagccacaaccaacugaccacugucccugagagauuauccaacuguuccagaagccucaagaaucugauucuuaagaauaaucaaaucaggagucugacgaaguauuuucuacaagaugccuuccaguugcgauaucuggaucucagcucaaauaaaauccagaugauccaaaagaccagcuucccagaaaauguccucaacaaucugaagauguugcuuuugcaucauaaucgguuucugugcaccugugaugcugugugguuugucugguggguuaaccauacggaggugacuauuccuuaccuggccacagaugugacuuguguggggccaggagcacacaagggccaaagugugaucucccuggaucuguacaccugugaguuagaucugacuaaccugauucuguucucacuuuccauaucuguaucucucuuucucauggugaugaugacagcaagucaccucuauuucugggaugugugguauauuuaccauuucuguaaggccaagauaaagggguaucagcgucuaauaucaccagacuguugcuaugaugcuuuuauuguguaugacacuaaagacccagcugugaccgaguggguuuuggcugagcugguggccaaacuggaagacccaagagagaaacauuuuaauuuaugucucgaggaaagggacugguuaccagggcagccaguucuggaaaaccuuucccagagcauacagcuuagcaaaaagacaguguuugugaugacagacaaguaugcaaagacugaaaauuuuaagauagcauuuuacuugucccaucagaggcucauggaugaaaaaguugaugugauuaucuugauauuucuugagaagcccuuucagaaguccaaguuccuccagcuccggaaaaggcucugugggaguucuguccuugaguggccaacaaacccgcaagcucacccauacuucuggcagugucuaaagaacgcccuggccacagacaaucauguggccuauagucagguguucaaggaaacggucuag

SEQ ID NO: 9776 - RNA, 3150 nt, Artificial Sequence; identical to SEQ ID NO: 9762
  derived and/or modified sequence opt1 from TLR7__Homo_sapiens__AAF60188

SEQ ID NO: 9777 - RNA, 3150 nt, Artificial Sequence; identical to SEQ ID NO: 9763
  derived and/or modified sequence opt2 from TLR7__Homo_sapiens__AAF60188

SEQ ID NO: 9778 - RNA, 3150 nt, Artificial Sequence; identical to SEQ ID NO: 9764
  derived and/or modified sequence opt3 from TLR7__Homo_sapiens__AAF60188

SEQ ID NO: 9779 - RNA, 3150 nt, Artificial Sequence; identical to SEQ ID NO: 9765
  derived and/or modified sequence opt4 from TLR7__Homo_sapiens__AAF60188

SEQ ID NO: 9780 - RNA, 3150 nt, Artificial Sequence; identical to SEQ ID NO: 9766
  derived and/or modified sequence opt5 from TLR7__Homo_sapiens__AAF60188

SEQ ID NO: 9781 - protein, 1041 aa, Artificial Sequence [sequence omitted]

SEQ ID NO: 9782 - RNA, 3126 nt, Artificial Sequence
  TLR8__Homo_sapiens__AAI01076
auggaaaacauguuccuucagucgucaaugcugaccugcauuuuccugcuaauaucugguuccugugaguuaugcgccgaagaaaauuuuucuagaagcuauccuugugaugagaaaaagcaaaaugacucaguuauugcagagugcagcaaucgucgacuacaggaaguuccccaaacggugggcaaauaugugacagaacuagaccugucugauaauuucaucacacacauaacgaaugaaucauuucaagggcugcaaaaucucacuaaaauaaaucuaaaccacaaccccaauguacagcaccagaacggaaaucccgguauacaaucaaauggcuugaauaucacagacggggcauuccucaaccuaaaaaaccuaagggaguuacugcuugaagacaaccaguuaccccaaauacccucugguuugccagagucuuugacagaacuuagucuaauucaaaacaauauauacaacauaacuaaagagggcauuucaagacuuauaaacuugaaaaaucucuauuuggccuggaacugcuauuuuaacaaaguuugcgagaaaacuaacauagaagauggaguauuugaaacgcugacaaauuuggaguugcuaucacuaucuuucaauucucuuucacacgugccacccaaacugccaagcucccuacgcaaacuuuuucugagcaacacccagaucaaauacauuagugaagaagauuucaagggauugauaaauuuaacauuacuagauuuaagcgggaacuguccgaggugcuucaaugccccauuuccaugcgugccuugugaugguggugcuucaauuaauauagaucguuuugcuuuucaaaacuugacccaacuucgauaccuaaaccucucuagcacuucccucaggaagauuaaugcugccugguuuaaaaauaugccucaucugaaggugcuggaucuugaauucaacuauuuagugggagaaauagccucuggggcauuuuuaacgaugcugccccgcuuagaaauacuugacuugucuuuuaacuauauaaaggggaguuauccacagcauauuaauauuuccagaaacuucucuaaacuuuugucucuacgggcauugcauuuaagagguuauguguuccaggaacucagagaagaugauuuccagccccugaugcagcuuccaaacuuaucgacuaucaacuuggguauuaauuuuauuaagcaaaucgauuucaaacuuuuccaaaauuucuccaaucuggaaauuauuuacuugucagaaaacagaauaucaccguugguaaaagauacccggcagaguuaugcaaauaguuccucuuuucaacgucauauccggaaacgacgcucaacagauuuugaguuugacccacauucgaacuuuuaucauuucacccguccuuuaauaaagccacaaugugcugcuuauggaaaagccuuagauuuaagccucaacaguauuuucuucauugggccaaaccaauuugaaaaucuuccugacauugccuguuuaaaucugucugcaaauagcaaugcucaaguguuaaguggaacugaauuuucagccauuccucaugucaaauauuuggauuugacaaacaauagacuagacuuugauaaugcuagugcucuuacugaauuguccgacuuggaaguucuagaucucagcuauaauucacacuauuucagaauagcaggcguaacacaucaucuagaauuuauucaaaauuucacaaaucuaaaaguuuuaaacuugagccacaacaacauuuauacuuuaacagauaaguauaaccuggaaagcaagucccugguagaauuaguuuucaguggcaaucgccuugacauuuuguggaaugaugaugacaacagguauaucuccauuuucaaaggucucaagaaucugacacgucuggauuuaucccuuaauaggcugaagcacaucccaaaugaagcauuccuuaauuugccagcgagucucacugaacuacauauaaaugauaauauguuaaaguuuuuuaacuggacauuacuccagcaguuuccucgucucgaguugcuugacuuacguggaaacaaacuacucuuuuuaacugauagccuaucugacuuuacaucuucccuucggacacugcugcugagucauaacaggauuucccaccuacccucuggcuuucuuucugaagucaguagucugaagcaccucgauuuaaguuccaaucugcuaaaaacaaucaacaaauccgcacuugaaacuaagaccaccaccaaauuaucuauguuggaacuacacggaaaccccuuugaaugcaccugugacauuggagauuuccgaagauggauggaugaacaucugaaugucaaaauucccagacugguagaugucauuugugccaguccuggggaucaaagagggaagaguauugugagucuggagcuaacaacuuguguuucagaugucacugcagugauauuauuuuucuucacguucuuuaucaccaccaugguuauguuggcugcccuggcucaccauuuguuuuacugggauguuugguuuauauauaauguguguuuagcuaagguaaaaggcuacaggucucuuuccacaucccaaacuuucuaugaugcuuacguuucuuaugacaccaaagaugccucuguuacugacugggugauaaaugagcugcgcuaccaccuugaagagagccgagacaaaaacguucuccuuugucuagaggagagggauugggacccgggauuggccaucaucgacaaccucaugcagagcaucaaccaaagcaagaaaacaguauuuguuuuaaccaaaaaauaugcaaaaagcuggaacuuuaaaacagcuuuuuacuuggcuuugcagaggcuaauggaugagaacauggaugugauuauauuuauccugcuggagccaguguuacagcauucucaguauuugaggcuacggcagcggaucuguaagagcuccauccuccaguggccugacaacccgaaggcagaaggcuuguuuuggcaaacucugagaaauguggucuugacugaaaaugauucacgguauaacaauauguaugucgauuccauuaagcaauacuaa

SEQ ID NO: 9783 - RNA, 3126 nt, Artificial Sequence
  derived and/or modified sequence opt1 from TLR8__Homo_sapiens__AAI01076
auggagaacauguuccugcagagcuccaugcugaccugcaucuuccugcugaucagcggcuccugcgagcucugcgccgaggagaacuucagccgcuccuaccccugcgacgagaagaagcagaacgacagcgugaucgccgagugcuccaaccggcgccugcaggaggucccgcagaccguggggaaguacgugacggagcuggaccucagcgacaacuucaucacccacaucaccaacgaguccuuccagggccugcagaaccugaccaagaucaaccucaaccacaaccccaacguccagcaccagaacgggaaccccggcauccagagcaacgggcugaacaucacggacggcgcguuccugaaccucaagaaccugcgggagcugcuccuggaggacaaccagcugccccagaucccguccggccuccccgagagccugaccgagcugucccucauccagaacaacaucuacaacaucaccaaggaggggaucagccgccugaucaaccugaagaaccucuaccuggccuggaacugcuacuucaacaaggugugcgagaagaccaacaucgaggacggcguguucgagacgcugaccaaccucgagcugcugucccucagcuucaacucccugagccacgucccgcccaagcugcccuccagccuccggaagcuguuccugagcaacacccagaucaaguacaucuccgaggaggacuucaaggggcucaucaaccugacccugcucgaccugagcggcaacugcccccgcugcuucaacgcccccuuccccugcgugccgugcgacgggggcgccuccaucaacaucgaccgguucgccuuccagaaccugacgcagcuccgcuaccugaaccugagcuccaccagccuccggaagaucaacgcggccugguucaagaacaugccccaccugaaggugcuggaccucgaguucaacuaccuggucggcgagaucgccuccggggccuuccugaccaugcugccccgccucgagauccuggaccugagcuucaacuacaucaagggcuccuacccccagcacaucaacaucagccggaacuucuccaagcuccugagccugcgcgcgcuccaccuccggggguacguguuccaggagcugcgcgaggacgacuuccagccgcucaugcagcugcccaaccuguccaccaucaaccucggcaucaacuucaucaagcagaucgacuucaagcuguuccagaacuucagcaaccuggagaucaucuaccucuccgagaaccggaucagcccccuggugaaggacacgcgccaguccuacgccaacagcuccagcuuccagcggcacauccgcaagcggcgcagcaccgacuucgaguucgacccccacuccaacuucuaccacuucacccggccgcugaucaagccccagugcgccgccuacggcaaggcccucgaccugagccugaacuccaucuucuucaucgggcccaaccaguucgagaaccuccccgacaucgcgugccugaaccugagcgccaacuccaacgcccagguccucagcggcaccgaguucuccgccaucccgcacgugaaguaccuggaccugacgaacaaccgccucgacuucgacaacgccagcgcgcugaccgagcuguccgaccucgaggugcuggaccugagcuacaacucccacuacuuccgcaucgccggggucacccaccaccucgaguucauccagaacuucaccaaccugaaggugcugaaccucagccacaacaacaucuacacgcugaccgacaaguacaaccuggaguccaagagccucguggagcuggucuucuccggcaaccggcuggacauccucuggaacgacgacgacaaccgcuacaucagcaucuucaaggggcugaagaaccugacccggcucgaccugucccugaaccgccucaagcacauccccaacgaggccuuccugaaccugcccgccagccucaccgagcugcacaucaacgacaacaugcugaaguucuucaacuggacgcuccugcagcaguucccccggcuggagcuccuggaccugcgcggcaacaagcuccuguuccugaccgacagccucuccgacuucaccagcucccugcggacccugcuccugagccacaaccgcaucucccaccucccgagcggcuuccuguccgaggugagcucccugaagcaccuggaccucagcuccaaccugcugaagacgaucaacaagagcgcccucgagaccaagaccaccacgaagcuguccaugcuggagcuccacgggaaccccuucgagugcacgugcgacaucggcgacuuccggcgcuggauggacgagcaccugaacgugaagaucccccggcuggucgacgugaucugcgcgagcccgggggaccagcgcggcaaguccaucgugagccucgagcugacgaccugcgucuccgacgugaccgccgucauccuguucuucuucaccuucuucaucaccaccauggugaugcucgccgcccuggcccaccaccuguucuacugggacgugugguucaucuacaacgucugccucgcgaaggugaagggguaccggagccuguccaccagccagaccuucuacgacgccuacgugagcuacgacaccaaggacgccuccgucaccgacugggugaucaacgagcugcgcuaccaccucgaggagagccgggacaagaacgugcugcugugccucgaggagcgcgacugggaccccggccuggccaucaucgacaaccugaugcaguccaucaaccagagcaagaagaccgucuucgugcugacgaagaaguacgcgaaguccuggaacuucaagaccgccuucuaccucgcccugcagcggcugauggacgagaacauggacgugaucaucuucauccuccuggagcccguccugcagcacagccaguaccuccgccugcggcagcgcaucugcaaguccagcauccugcaguggcccgacaacccgaaggccgagggccucuucuggcagacccugcgcaacguggugcugaccgagaacgacucccgguacaacaacauguacgucgacagcaucaagcaguacuga

SEQ ID NO: 9784 - RNA, 3126 nt, Artificial Sequence
  derived and/or modified sequence opt2 from TLR8__Homo_sapiens__AAI01076
auggagaacauguuccuccaguccuccaugcucaccugcaucuuccuccucaucuccggcuccugcgagcucugcgccgaggagaacuucucccgcuccuaccccugcgacgagaagaagcagaacgacuccgucaucgccgagugcuccaaccgccgccuccaggaggucccccagaccgucggcaaguacgucaccgagcucgaccucuccgacaacuucaucacccacaucaccaacgaguccuuccagggccuccagaaccucaccaagaucaaccucaaccacaaccccaacguccagcaccagaacggcaaccccggcauccaguccaacggccucaacaucaccgacggcgccuuccucaaccucaagaaccuccgcgagcuccuccucgaggacaaccagcucccccagauccccuccggccuccccgagucccucaccgagcucucccucauccagaacaacaucuacaacaucaccaaggagggcaucucccgccucaucaaccucaagaaccucuaccucgccuggaacugcuacuucaacaaggucugcgagaagaccaacaucgaggacggcgucuucgagacccucaccaaccucgagcuccucucccucuccuucaacucccucucccacgucccccccaagcuccccuccucccuccgcaagcucuuccucuccaacacccagaucaaguacaucuccgaggaggacuucaagggccucaucaaccucacccuccucgaccucuccggcaacugcccccgcugcuucaacgcccccuuccccugcguccccugcgacggcggcgccuccaucaacaucgaccgcuucgccuuccagaaccucacccagcuccgcuaccucaaccucuccuccaccucccuccgcaagaucaacgccgccugguucaagaacaugccccaccucaagguccucgaccucgaguucaacuaccucgucggcgagaucgccuccggcgccuuccucaccaugcucccccgccucgagauccucgaccucuccuucaacuacaucaagggcuccuacccccagcacaucaacaucucccgcaacuucuccaagcuccucucccuccgcgcccuccaccuccgcggcuacgucuuccaggagcuccgcgaggacgacuuccagccccucaugcagcuccccaaccucuccaccaucaaccucggcaucaacuucaucaagcagaucgacuucaagcucuuccagaacuucuccaaccucgagaucaucuaccucuccgagaaccgcaucuccccccucgucaaggacacccgccaguccuacgccaacuccuccuccuuccagcgccacauccgcaagcgccgcuccaccgacuucgaguucgacccccacuccaacuucuaccacuucacccgcccccucaucaagccccagugcgccgccuacggcaaggcccucgaccucucccucaacuccaucuucuucaucggccccaaccaguucgagaaccuccccgacaucgccugccucaaccucuccgccaacuccaacgcccagguccucuccggcaccgaguucuccgccaucccccacgucaaguaccucgaccucaccaacaaccgccucgacuucgacaacgccuccgcccucaccgagcucuccgaccucgagguccucgaccucuccuacaacucccacuacuuccgcaucgccggcgucacccaccaccucgaguucauccagaacuucaccaaccucaagguccucaaccucucccacaacaacaucuacacccucaccgacaaguacaaccucgaguccaagucccucgucgagcucgucuucuccggcaaccgccucgacauccucuggaacgacgacgacaaccgcuacaucuccaucuucaagggccucaagaaccucacccgccucgaccucucccucaaccgccucaagcacauccccaacgaggccuuccucaaccuccccgccucccucaccgagcuccacaucaacgacaacaugcucaaguucuucaacuggacccuccuccagcaguucccccgccucgagcuccucgaccuccgcggcaacaagcuccucuuccucaccgacucccucuccgacuucaccuccucccuccgcacccuccuccucucccacaaccgcaucucccaccuccccuccggcuuccucuccgaggucuccucccucaagcaccucgaccucuccuccaaccuccucaagaccaucaacaaguccgcccucgagaccaagaccaccaccaagcucuccaugcucgagcuccacggcaaccccuucgagugcaccugcgacaucggcgacuuccgccgcuggauggacgagcaccucaacgucaagaucccccgccucgucgacgucaucugcgccucccccggcgaccagcgcggcaaguccaucgucucccucgagcucaccaccugcgucuccgacgucaccgccgucauccucuucuucuucaccuucuucaucaccaccauggucaugcucgccgcccucgcccaccaccucuucuacugggacgucugguucaucuacaacgucugccucgccaaggucaagggcuaccgcucccucuccaccucccagaccuucuacgacgccuacgucuccuacgacaccaaggacgccuccgucaccgacugggucaucaacgagcuccgcuaccaccucgaggagucccgcgacaagaacguccuccucugccucgaggagcgcgacugggaccccggccucgccaucaucgacaaccucaugcaguccaucaaccaguccaagaagaccgucuucguccucaccaagaaguacgccaaguccuggaacuucaagaccgccuucuaccucgcccuccagcgccucauggacgagaacauggacgucaucaucuucauccuccucgagcccguccuccagcacucccaguaccuccgccuccgccagcgcaucugcaaguccuccauccuccaguggcccgacaaccccaaggccgagggccucuucuggcagacccuccgcaacgucguccucaccgagaacgacucccgcuacaacaacauguacgucgacuccaucaagcaguacuga

SEQ ID NO: 9785 - RNA, 3126 nt, Artificial Sequence
  derived and/or modified sequence opt3 from TLR8__Homo_sapiens__AAI01076
auggagaacauguuccugcagagcuccauguugaccugcaucuuucuucugauuucuggcucaugugaauugugcgccgaggaaaauuucaguagaagcuaccccugugacgagaagaaacaaaacgauuccgugauagcugaaugcucuaauaggcgguuacaggaggucccucagacaguugggaaguaugugacugagcuggaccuaucggauaacuuuaucacgcacauuaccaaugaaucauuccagggacuccaaaaccugacaaaaaucaaucuuaaccauaauccaaacguacagcaccagaaugguaacccgggcauucagagcaaugggcugaacaucacugacggagcauuuuugaaucucaagaaccugcgcgagcugcucuuagaagauaaccaacugccccagauaccuaguggccuuccagaguccuugaccgagcugucucuaauccagaauaacauuuacaauaucacaaaagaagguauuagccgacucaucaaccugaagaaucuuuaucuggccuggaacuguuacuucaauaaggugugcgagaaaaccaacauagaagacggggucuuugagacuuugacaaaucucgaacuguuaucccugucauucaacagucucagccaugugcccccuaaacuuccaucuucccugcguaaguuguuucuaucaaauacccagauuaaguauaucagcgaggaggauuucaaaggacugauuaaccucacgcugcuugaccugaguggcaauugucccagaugcuuuaacgcgccuuucccauguguuccgugcgauggcggggcuucuaucaauaucgacagguuugccuuccaaaacuugacucagcuccgguaccugaacuuauccagcaccucgcugcgcaagauuaaugcagccugguucaagaacaugccccaccuaaaagugcucgaucuggaauuuaauuaucuugucggagagauagcuucuggugcauucuugacaaugcugccuagacucgaaauccuggaccuuuccuuuaacuacauuaagggcucauacccacagcauaucaauauaaguaggaacuucagcaaacuguugucccuccgggcccugcacuuacgcggguauguguuucaagagcugcgagaagaugacuuccagccccuaaugcagcucccuaaucugucuacuauuaaccuuggaaucaauuuuaucaagcagauugacuucaaauuguuucaaaacuucagcaaucuggagaucauuuaccucucagagaacagaauaaguccacugguaaaggauaccaggcaguccuaugcuaauucuucuucauuucagcggcacauccguaaacgcagaaguacagacuucgaauuugauccccauagcaacuucuaccacuucaccaggccguuaauuaagccucagugugccgcguauggcaaggcacuggaccuuuccuugaauagcaucuuuuucaucggucccaaccaauuugagaaccucccagauauugccugccugaaucuaucggcuaacagcaaugcccagguucuguccgggacggaauuuucagcaauaccucaugugaaauaccucgaccugacuaacaaucggcuugauuuugacaacgcuagugccuugacagagcugucugauuuagaaguccucgaccugagcuauaauucccacuacuuccgaaucgcgggagugacccaccaucuugaguuuauucagaacuucacuaaucugaagguguugaaccucucacacaauaacaucuacacacugaccgauaaauauaaucuagagagcaagucucuggucgaacucguuuucuccggcaaccgccuggacauucuuuggaaugacgaugacaacagauacaucaguauauucaaaggcuugaagaaccugacgagguuagaucucagccugaaucggcuuaagcauauccccaacgaggccuuucugaaucuaccagcaucucucaccgaacugcacauuaacgacaauauguugaaauucuuuaacuggacacuguuacagcaauucccccgccucgagcugcuugaucugagagggaauaagcuccucuuccugacugacucccuaucagauuuuaccaguagccugaggacacuucuccugucgcauaaccguaucucccacuugccuucuggauuccugagcgaggugucaaguuuaaaacaccucgaccuguccucuaaucuucugaagacuauuaacaaaagcgcuuuggaaaccaagacaaccacuaagcucuccaugcuggagcuacaugguaauccauuugaaugcacgugugauaucggcgacuuccggcgauggauggaugagcaccugaacguaaaaauaccgagacuuguggacgucauuugcgccucacccggggaucagaggggaaagagcaucgugagucucgaacugacaaccuguguuucugacgugacugcugucauuuuguuuuucuuuaccuucuuuaucacaaccauggugauguuagccgcacuggcccaucaccucuucuauugggacguaugguuuauauacaauguuugccuggcuaaagugaagggcuaucgcucccuuagcacuucgcagacauucuacgaugcguaugucucauacgacacgaaagaugcaucugugaccgacugggucaucaacgagcugcgguaccacuuggaggaaaguagagauaagaaugugcuacugugucucgaggaaagggacugggauccuggucuggccauuaucgacaaccuuaugcaguccauuaaucaaagcaagaaaacuguuuucguguuaacaaagaaauaugcuaagucuuggaacuuuaaaaccgccuucuaccuggcacuccagcgcuugauggaugagaacauggacguaaucauauuuauucugcucgaaccaguccugcagcauagccaauaucuucgacugcggcagcguaucugcaaguccucaaucuugcaguggcccgauaauccuaaagccgaggggcuauucuggcagacacugagaaacgugguucucacugagaaugacaguagguacaacaauauguauguggauagcauuaagcaauacuga

SEQ ID NO: 9786 - RNA, 3126 nt, Artificial Sequence
  derived and/or modified sequence opt4 from TLR8__Homo_sapiens__AAI01076
auggagaacauguuccugcagagcagcaugcugaccugcaucuuccugcugaucagcggcagcugcgagcugugcgccgaggagaacuucagcagaagcuaccccugcgacgagaagaagcagaacgacagcgugaucgccgagugcagcaacagaagacugcaggaggugccccagaccgugggcaaguacgugaccgagcuggaccugagcgacaacuucaucacccacaucaccaacgagagcuuccagggccugcagaaccugaccaagaucaaccugaaccacaaccccaacgugcagcaccagaacggcaaccccggcauccagagcaacggccugaacaucaccgacggcgccuuccugaaccugaagaaccugagagagcugcugcuggaggacaaccagcugccccagauccccagcggccugcccgagagccugaccgagcugagccugauccagaacaacaucuacaacaucaccaaggagggcaucagcagacugaucaaccugaagaaccuguaccuggccuggaacugcuacuucaacaaggugugcgagaagaccaacaucgaggacggcguguucgagacccugaccaaccuggagcugcugagccugagcuucaacagccugagccacgugccccccaagcugcccagcagccugagaaagcuguuccugagcaacacccagaucaaguacaucagcgaggaggacuucaagggccugaucaaccugacccugcuggaccugagcggcaacugccccagaugcuucaacgcccccuuccccugcgugcccugcgacggcggcgccagcaucaacaucgacagauucgccuuccagaaccugacccagcugagauaccugaaccugagcagcaccagccugagaaagaucaacgccgccugguucaagaacaugccccaccugaaggugcuggaccuggaguucaacuaccuggugggcgagaucgccagcggcgccuuccugaccaugcugcccagacuggagauccuggaccugagcuucaacuacaucaagggcagcuacccccagcacaucaacaucagcagaaacuucagcaagcugcugagccugagagcccugcaccugagaggcuacguguuccaggagcugagagaggacgacuuccagccccugaugcagcugcccaaccugagcaccaucaaccugggcaucaacuucaucaagcagaucgacuucaagcuguuccagaacuucagcaaccuggagaucaucuaccugagcgagaacagaaucagcccccuggugaaggacaccagacagagcuacgccaacagcagcagcuuccagagacacaucagaaagagaagaagcaccgacuucgaguucgacccccacagcaacuucuaccacuucaccagaccccugaucaagccccagugcgccgccuacggcaaggcccuggaccugagccugaacagcaucuucuucaucggccccaaccaguucgagaaccugcccgacaucgccugccugaaccugagcgccaacagcaacgcccaggugcugagcggcaccgaguucagcgccaucccccacgugaaguaccuggaccugaccaacaacagacuggacuucgacaacgccagcgcccugaccgagcugagcgaccuggaggugcuggaccugagcuacaacagccacuacuucagaaucgccggcgugacccaccaccuggaguucauccagaacuucaccaaccugaaggugcugaaccugagccacaacaacaucuacacccugaccgacaaguacaaccuggagagcaagagccugguggagcugguguucagcggcaacagacuggacauccuguggaacgacgacgacaacagauacaucagcaucuucaagggccugaagaaccugaccagacuggaccugagccugaacagacugaagcacauccccaacgaggccuuccugaaccugcccgccagccugaccgagcugcacaucaacgacaacaugcugaaguucuucaacuggacccugcugcagcaguuccccagacuggagcugcuggaccugagaggcaacaagcugcuguuccugaccgacagccugagcgacuucaccagcagccugagaacccugcugcugagccacaacagaaucagccaccugcccagcggcuuccugagcgaggugagcagccugaagcaccuggaccugagcagcaaccugcugaagaccaucaacaagagcgcccuggagaccaagaccaccaccaagcugagcaugcuggagcugcacggcaaccccuucgagugcaccugcgacaucggcgacuucagaagauggauggacgagcaccugaacgugaagauccccagacugguggacgugaucugcgccagccccggcgaccagagaggcaagagcaucgugagccuggagcugaccaccugcgugagcgacgugaccgccgugauccuguucuucuucaccuucuucaucaccaccauggugaugcuggccgcccuggcccaccaccuguucuacugggacgugugguucaucuacaacgugugccuggccaaggugaagggcuacagaagccugagcaccagccagaccuucuacgacgccuacgugagcuacgacaccaaggacgccagcgugaccgacugggugaucaacgagcugagauaccaccuggaggagagcagagacaagaacgugcugcugugccuggaggagagagacugggaccccggccuggccaucaucgacaaccugaugcagagcaucaaccagagcaagaagaccguguucgugcugaccaagaaguacgccaagagcuggaacuucaagaccgccuucuaccuggcccugcagagacugauggacgagaacauggacgugaucaucuucauccugcuggagcccgugcugcagcacagccaguaccugagacugagacagagaaucugcaagagcagcauccugcaguggcccgacaaccccaaggccgagggccuguucuggcagacccugagaaacguggugcugaccgagaacgacagcagauacaacaacauguacguggacagcaucaagcaguacuga

SEQ ID NO: 9787 - RNA, 3126 nt, Artificial Sequence
  derived and/or modified sequence opt5 from TLR8__Homo_sapiens__AAI01076
auggagaacauguuccugcagagcuccaugcugaccugcaucuuucugcuuauuucuggcagcugugaacugugcgccgaggaaaauuucuccagaucuuaccccugugacgagaagaaacaaaacgauagcgugaucgcugaaugcuccaaucggcgccuccaggaggucccucagacaguugggaaguaugugacggagcuggaccuuucugauaacuuuauuacccacaucacaaaugaauccuuccagggacugcaaaaccucaccaaaauuaaucugaaccauaauccgaacgugcagcaccagaauggcaaccccgggauccaguccaauggacugaacaucacagacggcgccuuucucaaucugaagaaccuuagagagcugcuccuggaagauaaccaacuuccucagauucccagcgggcugccugagucucucaccgagcugucccugauccagaauaacauuuacaauaucacaaaagaaggaauuagccggcucaucaaccugaagaaucuuuaucuggcguggaacuguuacuucaauaaggucugcgagaaaaccaacauugaagacggcguguuugagacgcucaccaaucuggaacuucugucucucuccuucaacagccugucucauguucccccuaagcugccguccagccuccgcaaacuguuucuuuccaauacacagaucaaguauaucucugaggaggauuucaaaggccugauuaaccucacccugcuugaccugagcgggaauugucccagaugcuuuaacgcuccuuuccccugugugccuugcgauggaggcgccuccaucaauauugaccgguuugccuuccaaaaccucacacagcugcgcuaccugaaccucagcucuaccucccugagaaagaucaaugcugccugguucaagaacaugccccaccuuaaaguccuggaucucgaauuuaauuaucuggugggggagauugcuagcggagccuuccugacgaugcuuccgcggcucgaaauccuggaccugucuuuuaacuacaucaagggcagcuacccucagcauauuaauaucucccgcaacuucucuaaacuccugagccuuagagcgcugcaccuccggggguauguuuuucaagagcugcgcgaagaugacuuccagccccugaugcagcuuccuaaucucuccacaauuaaccugggaaucaauuuuauuaagcagaucgacuucaaacuguuucaaaacuucagcaaucucgagaucauuuaccugucugagaacagaaucagcccccuugugaaggauacccggcagagcuaugccaauucuuccagcuuucagcgccacauuagaaaacggagauccacagacuucgaauuugauccccauucuaacuucuaccacuucacccgcccucugaucaagccgcagugugcugccuauggcaaggcucucgaccugagccucaauuccauuuucuucaucggccccaaccaauuugagaaccuuccugauauugccugccucaaucugucugcgaacagcaaugcccagguccuguccgggaccgaauuuagcgcuaucccccaugugaaauaccucgaccugacaaacaaucggcuugauuuugacaacgccucugcucugacggagcucuccgaucuggaagugcuggaccuuagcuauaauucucacuacuucagaaucgccggagucacccaccaucucgaguuuauucagaacuucacaaaucugaagguucugaaccucucccacaauaacaucuacacccugacagauaaauauaaucuugagagcaagucucugguggaacucguguuuagcggcaaccgccuggacauucuguggaaugacgaugacaaccgguacaucuccauuuucaaagggcuuaagaaccugaccagacucgaucugagccucaaucgccugaagcauaucccuaacgaggccuuucuuaaucugcccgcuucucucacggaacugcacaucaacgacaauaugcugaaauucuuuaacuggacacuucugcagcaauucccgcggcucgagcugcucgaucugagaggaaauaaacuucuguuccucaccgacucccugagcgauuuuaccuccucucugcgcacacuucugcucagccauaaccggauuucccaucugccuucuggcuuccucagcgaggucuccucucugaagcaccuugaccugagcuccaaucugcucaagaccaucaacaaaagcgcgcuggaaacaaagacgaccacaaaacuuucuaugcuggagcuccacgggaaucccuuugaaugcaccugugauauuggagacuucagacgcuggauggaugagcaccugaacgugaagaucccucggcucguugacgugauuugcgccucccccggcgaucagagaggcaagagcaucgucucucuggaacuuacaaccuguguguccgacguuacggcugugauccuguuuuucuuuaccuucuuuauuacaaccauggucaugcuggccgcccucgcucaucaccuguucuauugggacgugugguuuaucuacaaugucugccuugccaaagugaagggguaucggagccugucuacaucccagaccuucuacgaugcguauguuagcuacgacacgaaagaugcuuccgugacagacugggucauuaacgagcuccgcuaccaccuggaggaaagcagagauaagaaugugcuccugugucuugaggaacgggacugggauccuggacuggccaucauugacaaccugaugcagucuaucaaucaaagcaagaaaaccguuuucgugcucacaaagaaauaugccaaguccuggaacuuuaaaaccgcuuucuaccuggcccuucagagacugauggaugagaacauggacgucaucauuuuuauccuccuggaacccgugcuccagcauucucaauaucugcgccuucggcagagaauuugcaagagcuccauccugcaguggccggauaauccuaaagcugagggccuguucuggcagacccuccgcaacgugguucugacagagaaugacucuagauacaacaauauguaugucgauagcauuaagcaauacuga

SEQ ID NO: 9788 - protein, 1041 aa, Artificial Sequence [sequence omitted]

SEQ ID NO: 9789 - RNA, 3126 nt, Artificial Sequence
  TLR8__Homo_sapiens__AAI01075
auggaaaacauguuccuucagucgucaaugcugaccugcauuuuccugcuaauaucugguuccugugaguuaugcgccgaagaaaauuuuucuagaagcuauccuugugaugagaaaaagcaaaaugacucaguuauugcagagugcagcaaucgucgacuacaggaaguuccccaaacggugggcaaauaugugacagaacuagaccugucugauaauuucaucacacacauaacgaaugaaucauuucaagggcugcaaaaucucacuaaaauaaaucuaaaccacaaccccaauguacagcaccagaacggaaaucccgguauacaaucaaauggcuugaauaucacagacggggcauuccucaaccuaaaaaaccuaagggaguuacugcuugaagacaaccaguuaccccaaauacccucugguuugccagagucuuugacagaacuuagucuaauucaaaacaauauauacaacauaacuaaagagggcauuucaagacuuauaaacuugaaaaaucucuauuuggccuggaacugcuauuuuaacaaaguuugcgagaaaacuaacauagaagauggaguauuugaaacgcugacaaauuuggaguugcuaucacuaucuuucaauucucuuucacaugugccacccaaacugccaagcucccuacgcaaacuuuuucugagcaacacccagaucaaauacauuagugaagaagauuucaagggauugauaaauuuaacauuacuagauuuaagcgggaacuguccgaggugcuucaaugccccauuuccaugcgugccuugugaugguggugcuucaauuaauauagaucguuuugcuuuucaaaacuugacccaacuucgauaccuaaaccucucuagcacuucccucaggaagauuaaugcugccugguuuaaaaauaugccucaucugaaggugcuggaucuugaauucaacuauuuagugggagaaauagccucuggggcauuuuuaacgaugcugccccgcuuagaaauacuugacuugucuuuuaacuauauaaaggggaguuauccacagcauauuaauauuuccagaaacuucucuaaacuuuugucucuacgggcauugcauuuaagagguuauguguuccaggaacucagagaagaugauuuccagccccugaugcagcuuccaaacuuaucgacuaucaacuuggguauuaauuuuauuaagcaaaucgauuucaaacuuuuccaaaauuucuccaaucuggaaauuauuuacuugucagaaaacagaauaucaccguugguaaaagauacccggcagaguuaugcaaauaguuccucuuuucaacgucauauccggaaacgacgcucaacagauuuugaguuugacccacauucgaacuuuuaucauuucacccguccuuuaauaaagccacaaugugcugcuuauggaaaagccuuagauuuaagccucaacaguauuuucuucauugggccaaaccaauuugaaaaucuuccugacauugccuguuuaaaucugucugcaaauagcaaugcucaaguguuaaguggaacugaauuuucagccauuccucaugucaaauauuuggauuugacaaacaauagacuagacuuugauaaugcuagugcucuuacugaauuguccgacuuggaaguucuagaucucagcuauaauucacacuauuucagaauagcaggcguaacacaucaucuagaauuuauucaaaauuucacaaaucuaaaaguuuuaaacuugagccacaacaacauuuauacuuuaacagauaaguauaaccuggaaagcaagucccugguagaauuaguuuucaguggcaaucgccuugacauuuuguggaaugaugaugacaacagguauaucuccauuuucaaaggucucaagaaucugacacgucuggauuuaucccuuaauaggcucaagcacaucccaaaugaagcauuccuuaauuugccagcgagucucacugaacuacauauaaaugauaauauguuaaaguuuuuuaacuggacauuacuccagcaguuuccucgucucgaguugcuugacuuacguggaaacaaacuacucuuuuuaacugauagccuaucugacuuuacaucuucccuucggacacugcugcugagucauaacaggauuucccaccuacccucuggcuuucuuucugaagucaguagucugaagcaccucgauuuaaguuccaaucugcuaaaaacaauaaacaaauccgcacuugaaacuaagaccaccaccaaauuaucuauguuggaacuacacggaaaccccuuugaaugcaccugugacauuggagauuuccgaagauggauggaugaacaucugaaugucaaaauucccagacugguagaugucauuugugccaguccuggggaucaaagagggaagaguauugugagucuggagcuaacaacuuguguuucagaugucacugcagugauauuauuuuucuucacguucuuuaucaccaccaugguuauguuggcugcccuggcucaccauuuguuuuacugggauguuugguuuauauauaauguguguuuagcuaagguaaaaggcuacaggucucuuuccacaucccaaacuuucuaugaugcuuacauuucuuaugacaccaaagaugccucuguuacugacugggugauaaaugagcugugcuaccaccuugaagagagccgagacaaaaacguucuccuuugucuagaggagagggauugggacccgggauuggccaucaucgacaaccucaugcagagcaucaaccaaagcaagaaaacaguauuuguuuuaaccaaaaaauaugcaaaaagcuggaacuuuaaaacagcuuuuuacuuggcuuugcagaggcuaauggaugagaacauggaugugauuauauuuauccugcuggagccaguguuacagcauucucaguauuugaggcuacggcagcggaucuguaagagcuccauccuccaguggccugacaacccgaaggcagaaggcuuguuuuggcaaacucugagaaauguggucuugacugaaaaugauucacgguauaacaauauguaugucgauuccauuaagcaauacuaa

SEQ ID NO: 9790 - RNA, 3126 nt, Artificial Sequence
  derived and/or modified sequence opt1 from TLR8__Homo_sapiens__AAI01075
auggagaacauguuccugcagagcuccaugcugaccugcaucuuccugcugaucagcggcuccugcgagcucugcgccgaggagaacuucagccgcuccuaccccugcgacgagaagaagcagaacgacagcgugaucgccgagugcuccaaccggcgccugcaggaggucccgcagaccguggggaaguacgugacggagcuggaccucagcgacaacuucaucacccacaucaccaacgaguccuuccagggccugcagaaccugaccaagaucaaccucaaccacaaccccaacguccagcaccagaacgggaaccccggcauccagagcaacgggcugaacaucacggacggcgcguuccugaaccucaagaaccugcgggagcugcuccuggaggacaaccagcugccccagaucccguccggccuccccgagagccugaccgagcugucccucauccagaacaacaucuacaacaucaccaaggaggggaucagccgccugaucaaccugaagaaccucuaccuggccuggaacugcuacuucaacaaggugugcgagaagaccaacaucgaggacggcguguucgagacgcugaccaaccucgagcugcugucccucagcuucaacucccugagccacgucccgcccaagcugcccuccagccuccggaagcuguuccugagcaacacccagaucaaguacaucuccgaggaggacuucaaggggcucaucaaccugacccugcucgaccugagcggcaacugcccccgcugcuucaacgcccccuuccccugcgugccgugcgacgggggcgccuccaucaacaucgaccgguucgccuuccagaaccugacgcagcuccgcuaccugaaccugagcuccaccagccuccggaagaucaacgcggccugguucaagaacaugccccaccugaaggugcuggaccucgaguucaacuaccuggucggcgagaucgccuccggggccuuccugaccaugcugccccgccucgagauccuggaccugagcuucaacuacaucaagggcuccuacccccagcacaucaacaucagccggaacuucuccaagcuccugagccugcgcgcgcuccaccuccggggguacguguuccaggagcugcgcgaggacgacuuccagccgcucaugcagcugcccaaccuguccaccaucaaccucggcaucaacuucaucaagcagaucgacuucaagcuguuccagaacuucagcaaccuggagaucaucuaccucuccgagaaccggaucagcccccuggugaaggacacgcgccaguccuacgccaacagcuccagcuuccagcggcacauccgcaagcggcgcagcaccgacuucgaguucgacccccacuccaacuucuaccacuucacccggccgcugaucaagccccagugcgccgccuacggcaaggcccucgaccugagccugaacuccaucuucuucaucgggcccaaccaguucgagaaccuccccgacaucgcgugccugaaccugagcgccaacuccaacgcccagguccucagcggcaccgaguucuccgccaucccgcacgugaaguaccuggaccugacgaacaaccgccucgacuucgacaacgccagcgcgcugaccgagcuguccgaccucgaggugcuggaccugagcuacaacucccacuacuuccgcaucgccggggucacccaccaccucgaguucauccagaacuucaccaaccugaaggugcugaaccucagccacaacaacaucuacacgcugaccgacaaguacaaccuggaguccaagagccucguggagcuggucuucuccggcaaccggcuggacauccucuggaacgacgacgacaaccgcuacaucagcaucuucaaggggcugaagaaccugacccggcucgaccugucccugaaccgccucaagcacauccccaacgaggccuuccugaaccugcccgccagccucaccgagcugcacaucaacgacaacaugcugaaguucuucaacuggacgcuccugcagcaguucccccggcuggagcuccuggaccugcgcggcaacaagcuccuguuccugaccgacagccucuccgacuucaccagcucccugcggacccugcuccugagccacaaccgcaucucccaccucccgagcggcuuccuguccgaggugagcucccugaagcaccuggaccucagcuccaaccugcugaagacgaucaacaagagcgcccucgagaccaagaccaccacgaagcuguccaugcuggagcuccacgggaaccccuucgagugcacgugcgacaucggcgacuuccggcgcuggauggacgagcaccugaacgugaagaucccccggcuggucgacgugaucugcgcgagcccgggggaccagcgcggcaaguccaucgugagccucgagcugacgaccugcgucuccgacgugaccgccgucauccuguucuucuucaccuucuucaucaccaccauggugaugcucgccgcccuggcccaccaccuguucuacugggacgugugguucaucuacaacgucugccucgcgaaggugaagggguaccggagccuguccaccagccagaccuucuacgacgccuacaucagcuacgacaccaaggacgccuccgugaccgacugggucaucaacgagcugugcuaccaccucgaggagagccgcgacaagaacgugcugcugugccucgaggagcgggacugggaccccggccuggccaucaucgacaaccugaugcaguccaucaaccagagcaagaagaccguguucguccugacgaagaaguacgcgaaguccuggaacuucaagaccgccuucuaccucgcccugcagcgccugauggacgagaacauggacgugaucaucuucauccuccuggagcccgugcugcagcacagccaguaccuccggcugcgccagcggaucugcaaguccagcauccugcaguggcccgacaacccgaaggccgagggccucuucuggcagacccugcgcaacgucgugcugaccgagaacgacucccgcuacaacaacauguacguggacagcaucaagcaguacuga

SEQ ID NO: 9791 - RNA, 3126 nt, Artificial Sequence
  derived and/or modified sequence opt2 from TLR8__Homo_sapiens__AAI01075
auggagaacauguuccuccaguccuccaugcucaccugcaucuuccuccucaucuccggcuccugcgagcucugcgccgaggagaacuucucccgcuccuaccccugcgacgagaagaagcagaacgacuccgucaucgccgagugcuccaaccgccgccuccaggaggucccccagaccgucggcaaguacgucaccgagcucgaccucuccgacaacuucaucacccacaucaccaacgaguccuuccagggccuccagaaccucaccaagaucaaccucaaccacaaccccaacguccagcaccagaacggcaaccccggcauccaguccaacggccucaacaucaccgacggcgccuuccucaaccucaagaaccuccgcgagcuccuccucgaggacaaccagcucccccagauccccuccggccuccccgagucccucaccgagcucucccucauccagaacaacaucuacaacaucaccaaggagggcaucucccgccucaucaaccucaagaaccucuaccucgccuggaacugcuacuucaacaaggucugcgagaagaccaacaucgaggacggcgucuucgagacccucaccaaccucgagcuccucucccucuccuucaacucccucucccacgucccccccaagcuccccuccucccuccgcaagcucuuccucuccaacacccagaucaaguacaucuccgaggaggacuucaagggccucaucaaccucacccuccucgaccucuccggcaacugcccccgcugcuucaacgcccccuuccccugcguccccugcgacggcggcgccuccaucaacaucgaccgcuucgccuuccagaaccucacccagcuccgcuaccucaaccucuccuccaccucccuccgcaagaucaacgccgccugguucaagaacaugccccaccucaagguccucgaccucgaguucaacuaccucgucggcgagaucgccuccggcgccuuccucaccaugcucccccgccucgagauccucgaccucuccuucaacuacaucaagggcuccuacccccagcacaucaacaucucccgcaacuucuccaagcuccucucccuccgcgcccuccaccuccgcggcuacgucuuccaggagcuccgcgaggacgacuuccagccccucaugcagcuccccaaccucuccaccaucaaccucggcaucaacuucaucaagcagaucgacuucaagcucuuccagaacuucuccaaccucgagaucaucuaccucuccgagaaccgcaucuccccccucgucaaggacacccgccaguccuacgccaacuccuccuccuuccagcgccacauccgcaagcgccgcuccaccgacuucgaguucgacccccacuccaacuucuaccacuucacccgcccccucaucaagccccagugcgccgccuacggcaaggcccucgaccucucccucaacuccaucuucuucaucggccccaaccaguucgagaaccuccccgacaucgccugccucaaccucuccgccaacuccaacgcccagguccucuccggcaccgaguucuccgccaucccccacgucaaguaccucgaccucaccaacaaccgccucgacuucgacaacgccuccgcccucaccgagcucuccgaccucgagguccucgaccucuccuacaacucccacuacuuccgcaucgccggcgucacccaccaccucgaguucauccagaacuucaccaaccucaagguccucaaccucucccacaacaacaucuacacccucaccgacaaguacaaccucgaguccaagucccucgucgagcucgucuucuccggcaaccgccucgacauccucuggaacgacgacgacaaccgcuacaucuccaucuucaagggccucaagaaccucacccgccucgaccucucccucaaccgccucaagcacauccccaacgaggccuuccucaaccuccccgccucccucaccgagcuccacaucaacgacaacaugcucaaguucuucaacuggacccuccuccagcaguucccccgccucgagcuccucgaccuccgcggcaacaagcuccucuuccucaccgacucccucuccgacuucaccuccucccuccgcacccuccuccucucccacaaccgcaucucccaccuccccuccggcuuccucuccgaggucuccucccucaagcaccucgaccucuccuccaaccuccucaagaccaucaacaaguccgcccucgagaccaagaccaccaccaagcucuccaugcucgagcuccacggcaaccccuucgagugcaccugcgacaucggcgacuuccgccgcuggauggacgagcaccucaacgucaagaucccccgccucgucgacgucaucugcgccucccccggcgaccagcgcggcaaguccaucgucucccucgagcucaccaccugcgucuccgacgucaccgccgucauccucuucuucuucaccuucuucaucaccaccauggucaugcucgccgcccucgcccaccaccucuucuacugggacgucugguucaucuacaacgucugccucgccaaggucaagggcuaccgcucccucuccaccucccagaccuucuacgacgccuacaucuccuacgacaccaaggacgccuccgucaccgacugggucaucaacgagcucugcuaccaccucgaggagucccgcgacaagaacguccuccucugccucgaggagcgcgacugggaccccggccucgccaucaucgacaaccucaugcaguccaucaaccaguccaagaagaccgucuucguccucaccaagaaguacgccaaguccuggaacuucaagaccgccuucuaccucgcccuccagcgccucauggacgagaacauggacgucaucaucuucauccuccucgagcccguccuccagcacucccaguaccuccgccuccgccagcgcaucugcaaguccuccauccuccaguggcccgacaaccccaaggccgagggccucuucuggcagacccuccgcaacgucguccucaccgagaacgacucccgcuacaacaacauguacgucgacuccaucaagcaguacuga

SEQ ID NO: 9792 - RNA, 3126 nt, Artificial Sequence
  derived and/or modified sequence opt3 from TLR8__Homo_sapiens__AAI01075
auggagaacauguuccugcagagcuccauguugaccugcaucuuucuucugauuucuggcucaugugaauugugcgccgaggaaaauuucaguagaagcuaccccugugacgagaagaaacaaaacgauuccgugauagcugaaugcucuaauaggcgguuacaggaggucccucagacaguugggaaguaugugacugagcuggaccuaucggauaacuuuaucacgcacauuaccaaugaaucauuccagggacuccaaaaccugacaaaaaucaaucuuaaccauaauccaaacguacagcaccagaaugguaacccgggcauucagagcaaugggcugaacaucacugacggagcauuuuugaaucucaagaaccugcgcgagcugcucuuagaagauaaccaacugccccagauaccuaguggccuuccagaguccuugaccgagcugucucuaauccagaauaacauuuacaauaucacaaaagaagguauuagccgacucaucaaccugaagaaucuuuaucuggccuggaacuguuacuucaauaaggugugcgagaaaaccaacauagaagacggggucuuugagacuuugacaaaucucgaacuguuaucccugucauucaacagucucagccaugugcccccuaaacuuccaucuucccugcguaaguuguuucuaucaaauacccagauuaaguauaucagcgaggaggauuucaaaggacugauuaaccucacgcugcuugaccugaguggcaauugucccagaugcuuuaacgcgccuuucccauguguuccgugcgauggcggggcuucuaucaauaucgacagguuugccuuccaaaacuugacucagcuccgguaccugaacuuauccagcaccucgcugcgcaagauuaaugcagccugguucaagaacaugccccaccuaaaagugcucgaucuggaauuuaauuaucuugucggagagauagcuucuggugcauucuugacaaugcugccuagacucgaaauccuggaccuuuccuuuaacuacauuaagggcucauacccacagcauaucaauauaaguaggaacuucagcaaacuguugucccuccgggcccugcacuuacgcggguauguguuucaagagcugcgagaagaugacuuccagccccuaaugcagcucccuaaucugucuacuauuaaccuuggaaucaauuuuaucaagcagauugacuucaaauuguuucaaaacuucagcaaucuggagaucauuuaccucucagagaacagaauaaguccacugguaaaggauaccaggcaguccuaugcuaauucuucuucauuucagcggcacauccguaaacgcagaaguacagacuucgaauuugauccccauagcaacuucuaccacuucaccaggccguuaauuaagccucagugugccgcguauggcaaggcacuggaccuuuccuugaauagcaucuuuuucaucggucccaaccaauuugagaaccucccagauauugccugccugaaucuaucggcuaacagcaaugcccagguucuguccgggacggaauuuucagcaauaccucaugugaaauaccucgaccugacuaacaaucggcuugauuuugacaacgcuagugccuugacagagcugucugauuuagaaguccucgaccugagcuauaauucccacuacuuccgaaucgcgggagugacccaccaucuugaguuuauucagaacuucacuaaucugaagguguugaaccucucacacaauaacaucuacacacugaccgauaaauauaaucuagagagcaagucucuggucgaacucguuuucuccggcaaccgccuggacauucuuuggaaugacgaugacaacagauacaucaguauauucaaaggcuugaagaaccugacgagguuagaucucagccugaaucggcuuaagcauauccccaacgaggccuuucugaaucuaccagcaucucucaccgaacugcacauuaacgacaauauguugaaauucuuuaacuggacacuguuacagcaauucccccgccucgagcugcuugaucugagagggaauaagcuccucuuccugacugacucccuaucagauuuuaccaguagccugaggacacuucuccugucgcauaaccguaucucccacuugccuucuggauuccugagcgaggugucaaguuuaaaacaccucgaccuguccucuaaucuucugaagacuauuaacaaaagcgcuuuggaaaccaagacaaccacuaagcucuccaugcuggagcuacaugguaauccauuugaaugcacgugugauaucggcgacuuccggcgauggauggaugagcaccugaacguaaaaauaccgagacuuguggacgucauuugcgccucacccggggaucagaggggaaagagcaucgugagucucgaacugacaaccuguguuucugacgugacugcugucauuuuguuuuucuuuaccuucuuuaucacaaccauggugauguuagccgcacuggcccaucaccucuucuauugggacguaugguuuauauacaauguuugccuggcuaaagugaagggcuaucgcucccuuagcacuucgcagacauucuacgaugcguauaucucauacgacacgaaagaugcaucugucaccgacugggugauuaacgagcuguguuaccacuuggaggaaagucgggauaagaauguccuacugugccucgaggaaagagacugggauccuggucuggccaucauugacaaccuuaugcaguccaucaaucaaagcaagaaaacuguguucguuuuaacaaagaaauaugcuaagucuuggaacuuuaaaaccgccuucuaccuggcacuccagagguugauggaugagaacauggacgugauaauuuuuauccugcucgaaccaguacugcagcauagccaauaucuucgccugcgacagcggaucuguaaguccucaauuuugcaguggcccgauaauccuaaagccgaggggcuauucuggcagacacugcguaacgucgugcucacugagaaugacaguagauacaacaauauguauguugauagcaucaagcaauacuga

SEQ ID NO: 9793 - RNA, 3126 nt, Artificial Sequence
  derived and/or modified sequence opt4 from TLR8__Homo_sapiens__AAI01075
auggagaacauguuccugcagagcagcaugcugaccugcaucuuccugcugaucagcggcagcugcgagcugugcgccgaggagaacuucagcagaagcuaccccugcgacgagaagaagcagaacgacagcgugaucgccgagugcagcaacagaagacugcaggaggugccccagaccgugggcaaguacgugaccgagcuggaccugagcgacaacuucaucacccacaucaccaacgagagcuuccagggccugcagaaccugaccaagaucaaccugaaccacaaccccaacgugcagcaccagaacggcaaccccggcauccagagcaacggccugaacaucaccgacggcgccuuccugaaccugaagaaccugagagagcugcugcuggaggacaaccagcugccccagauccccagcggccugcccgagagccugaccgagcugagccugauccagaacaacaucuacaacaucaccaaggagggcaucagcagacugaucaaccugaagaaccuguaccuggccuggaacugcuacuucaacaaggugugcgagaagaccaacaucgaggacggcguguucgagacccugaccaaccuggagcugcugagccugagcuucaacagccugagccacgugccccccaagcugcccagcagccugagaaagcuguuccugagcaacacccagaucaaguacaucagcgaggaggacuucaagggccugaucaaccugacccugcuggaccugagcggcaacugccccagaugcuucaacgcccccuuccccugcgugcccugcgacggcggcgccagcaucaacaucgacagauucgccuuccagaaccugacccagcugagauaccugaaccugagcagcaccagccugagaaagaucaacgccgccugguucaagaacaugccccaccugaaggugcuggaccuggaguucaacuaccuggugggcgagaucgccagcggcgccuuccugaccaugcugcccagacuggagauccuggaccugagcuucaacuacaucaagggcagcuacccccagcacaucaacaucagcagaaacuucagcaagcugcugagccugagagcccugcaccugagaggcuacguguuccaggagcugagagaggacgacuuccagccccugaugcagcugcccaaccugagcaccaucaaccugggcaucaacuucaucaagcagaucgacuucaagcuguuccagaacuucagcaaccuggagaucaucuaccugagcgagaacagaaucagcccccuggugaaggacaccagacagagcuacgccaacagcagcagcuuccagagacacaucagaaagagaagaagcaccgacuucgaguucgacccccacagcaacuucuaccacuucaccagaccccugaucaagccccagugcgccgccuacggcaaggcccuggaccugagccugaacagcaucuucuucaucggccccaaccaguucgagaaccugcccgacaucgccugccugaaccugagcgccaacagcaacgcccaggugcugagcggcaccgaguucagcgccaucccccacgugaaguaccuggaccugaccaacaacagacuggacuucgacaacgccagcgcccugaccgagcugagcgaccuggaggugcuggaccugagcuacaacagccacuacuucagaaucgccggcgugacccaccaccuggaguucauccagaacuucaccaaccugaaggugcugaaccugagccacaacaacaucuacacccugaccgacaaguacaaccuggagagcaagagccugguggagcugguguucagcggcaacagacuggacauccuguggaacgacgacgacaacagauacaucagcaucuucaagggccugaagaaccugaccagacuggaccugagccugaacagacugaagcacauccccaacgaggccuuccugaaccugcccgccagccugaccgagcugcacaucaacgacaacaugcugaaguucuucaacuggacccugcugcagcaguuccccagacuggagcugcuggaccugagaggcaacaagcugcuguuccugaccgacagccugagcgacuucaccagcagccugagaacccugcugcugagccacaacagaaucagccaccugcccagcggcuuccugagcgaggugagcagccugaagcaccuggaccugagcagcaaccugcugaagaccaucaacaagagcgcccuggagaccaagaccaccaccaagcugagcaugcuggagcugcacggcaaccccuucgagugcaccugcgacaucggcgacuucagaagauggauggacgagcaccugaacgugaagauccccagacugguggacgugaucugcgccagccccggcgaccagagaggcaagagcaucgugagccuggagcugaccaccugcgugagcgacgugaccgccgugauccuguucuucuucaccuucuucaucaccaccauggugaugcuggccgcccuggcccaccaccuguucuacugggacgugugguucaucuacaacgugugccuggccaaggugaagggcuacagaagccugagcaccagccagaccuucuacgacgccuacaucagcuacgacaccaaggacgccagcgugaccgacugggugaucaacgagcugugcuaccaccuggaggagagcagagacaagaacgugcugcugugccuggaggagagagacugggaccccggccuggccaucaucgacaaccugaugcagagcaucaaccagagcaagaagaccguguucgugcugaccaagaaguacgccaagagcuggaacuucaagaccgccuucuaccuggcccugcagagacugauggacgagaacauggacgugaucaucuucauccugcuggagcccgugcugcagcacagccaguaccugagacugagacagagaaucugcaagagcagcauccugcaguggcccgacaaccccaaggccgagggccuguucuggcagacccugagaaacguggugcugaccgagaacgacagcagauacaacaacauguacguggacagcaucaagcaguacuga

SEQ ID NO: 9794 - RNA, 3126 nt, Artificial Sequence
  derived and/or modified sequence opt5 from TLR8__Homo_sapiens__AAI01075
auggagaacauguuccugcagagcuccaugcugaccugcaucuuucugcuuauuucuggcagcugugaacugugcgccgaggaaaauuucuccagaucuuaccccugugacgagaagaaacaaaacgauagcgugaucgcugaaugcuccaaucggcgccuccaggaggucccucagacaguugggaaguaugugacggagcuggaccuuucugauaacuuuauuacccacaucacaaaugaauccuuccagggacugcaaaaccucaccaaaauuaaucugaaccauaauccgaacgugcagcaccagaauggcaaccccgggauccaguccaauggacugaacaucacagacggcgccuuucucaaucugaagaaccuuagagagcugcuccuggaagauaaccaacuuccucagauucccagcgggcugccugagucucucaccgagcugucccugauccagaauaacauuuacaauaucacaaaagaaggaauuagccggcucaucaaccugaagaaucuuuaucuggcguggaacuguuacuucaauaaggucugcgagaaaaccaacauugaagacggcguguuugagacgcucaccaaucuggaacuucugucucucuccuucaacagccugucucauguucccccuaagcugccguccagccuccgcaaacuguuucuuuccaauacacagaucaaguauaucucugaggaggauuucaaaggccugauuaaccucacccugcuugaccugagcgggaauugucccagaugcuuuaacgcuccuuuccccugugugccuugcgauggaggcgccuccaucaauauugaccgguuugccuuccaaaaccucacacagcugcgcuaccugaaccucagcucuaccucccugagaaagaucaaugcugccugguucaagaacaugccccaccuuaaaguccuggaucucgaauuuaauuaucuggugggggagauugcuagcggagccuuccugacgaugcuuccgcggcucgaaauccuggaccugucuuuuaacuacaucaagggcagcuacccucagcauauuaauaucucccgcaacuucucuaaacuccugagccuuagagcgcugcaccuccggggguauguuuuucaagagcugcgcgaagaugacuuccagccccugaugcagcuuccuaaucucuccacaauuaaccugggaaucaauuuuauuaagcagaucgacuucaaacuguuucaaaacuucagcaaucucgagaucauuuaccugucugagaacagaaucagcccccuugugaaggauacccggcagagcuaugccaauucuuccagcuuucagcgccacauuagaaaacggagauccacagacuucgaauuugauccccauucuaacuucuaccacuucacccgcccucugaucaagccgcagugugcugccuauggcaaggcucucgaccugagccucaauuccauuuucuucaucggccccaaccaauuugagaaccuuccugauauugccugccucaaucugucugcgaacagcaaugcccagguccuguccgggaccgaauuuagcgcuaucccccaugugaaauaccucgaccugacaaacaaucggcuugauuuugacaacgccucugcucugacggagcucuccgaucuggaagugcuggaccuuagcuauaauucucacuacuucagaaucgccggagucacccaccaucucgaguuuauucagaacuucacaaaucugaagguucugaaccucucccacaauaacaucuacacccugacagauaaauauaaucuugagagcaagucucugguggaacucguguuuagcggcaaccgccuggacauucuguggaaugacgaugacaaccgguacaucuccauuuucaaagggcuuaagaaccugaccagacucgaucugagccucaaucgccugaagcauaucccuaacgaggccuuucuuaaucugcccgcuucucucacggaacugcacaucaacgacaauaugcugaaauucuuuaacuggacacuucugcagcaauucccgcggcucgagcugcucgaucugagaggaaauaaacuucuguuccucaccgacucccugagcgauuuuaccuccucucugcgcacacuucugcucagccauaaccggauuucccaucugccuucuggcuuccucagcgaggucuccucucugaagcaccuugaccugagcuccaaucugcucaagaccaucaacaaaagcgcgcuggaaacaaagacgaccacaaaacuuucuaugcuggagcuccacgggaaucccuuugaaugcaccugugauauuggagacuucagacgcuggauggaugagcaccugaacgugaagaucccucggcucguugacgugauuugcgccucccccggcgaucagagaggcaagagcaucgucucucuggaacuuacaaccuguguguccgacguuacggcugugauccuguuuuucuuuaccuucuuuauuacaaccauggucaugcuggccgcccucgcucaucaccuguucuauugggacgugugguuuaucuacaaugucugccuugccaaagugaagggguaucggagccugucuacaucccagaccuucuacgaugcguauauuagcuacgacacgaaagaugcuuccguuacagacugggugaucaacgagcucuguuaccaccuggaggaaagccgcgauaagaauguccuccugugccuugaggaaagagacugggauccuggacuggccauuaucgacaaccugaugcagucuaucaaucaaagcaagaaaaccguguucguucucacaaagaaauaugccaaguccuggaacuuuaaaaccgcuuucuaccuggcccuucagcggcugauggaugagaacauggacgugauuaucuuuauucuccuggaacccguccuccagcauucucaauaucugagacuucgccagcggaucuguaagagcuccauucugcaguggccggauaauccuaaagcugagggccuguucuggcagacccucagaaacguggugcugacagagaaugacucucgcuacaacaauauguauguugauagcaucaagcaauacuga

SEQ ID NO: 9795 - protein, 1041 aa, Artificial Sequence
  TLR8__Homo_sapiens__Q9NR97
MENMFLQSSMLTCIFLLISGSCELCAEENFSRSYPCDEKKQNDSVIAECSNRRLQEVPQTVGKYVTELDLSDNFITHITNESFQGLQNLTKINLNHNPNVQHQNGNPGIQSNGLNITDGAFLNLKNLRELLLEDNQLPQIPSGLPESLTELSLIQNNIYNITKEGISRLINLKNLYLAWNCYFNKVCEKTNIEDGVFETLTNLELLSLSFNSLSHVPPKLPSSLRKLFLSNTQIKYISEEDFKGLINLTLLDLSGNCPRCFNAPFPCVPCDGGASINIDRFAFQNLTQLRYLNLSSTSLRKINAAWFKNMPHLKVLDLEFNYLVGEIASGAFLTMLPRLEILDLSFNYIKGSYPQHINISRNFSKLLSLRALHLRGYVFQELREDDFQPLMQLPNLSTINLGINFIKQIDFKLFQNFSNLEIIYLSENRISPLVKDTRQSYANSSSFQRHIRKRRSTDFEFDPHSNFYHFTRPLIKPQCAAYGKALDLSLNSIFFIGPNQFENLPDIACLNLSANSNAQVLSGTEFSAIPHVKYLDLTNNRLDFDNASALTELSDLEVLDLSYNSHYFRIAGVTHHLEFIQNFTNLKVLNLSHNNIYTLTDKYNLESKSLVELVFSGNRLDILWNDDDNRYISIFKGLKNLTRLDLSLNRLKHIPNEAFLNLPASLTELHINDNMLKFFNWTLLQQFPRLELLDLRGNKLLFLTDSLSDFTSSLRTLLLSHNRISHLPSGFLSEVSSLKHLDLSSNLLKTINKSALETKTTTKLSMLELHGNPFECTCDIGDFRRWMDEHLNVKIPRLVDVICASPGDQRGKSIVSLELTTCVSDVTAVILFFFTFFITTMVMLAALAHHLFYWDVWFIYNVCLAKVKGYRSLSTSQTFYDAYISYDTKDASVTDWVINELRYHLEESRDKNVLLCLEERDWDPGLAIIDNLMQSINQSKKTVFVLTKKYAKSWNFKTAFYLALQRLMDENMDVIIFILLEPVLQHSQYLRLRQRICKSSILQWPDNPKAEGLFWQTLRNVVLTENDSRYNNMYVDSIKQY

SEQ ID NO: 9796 - RNA, 3126 nt, Artificial Sequence
  TLR8__Homo_sapiens__AAF78036
auggaaaacauguuccuucagucgucaaugcugaccugcauuuuccugcuaauaucugguuccugugaguuaugcgccgaagaaaauuuuucuagaagcuauccuugugaugagaaaaagcaaaaugacucaguuauugcagagugcagcaaucgucgacuacaggaaguuccccaaacggugggcaaauaugugacagaacuagaccugucugauaauuucaucacacacauaacgaaugaaucauuucaagggcugcaaaaucucacuaaaauaaaucuaaaccacaaccccaauguacagcaccagaacggaaaucccgguauacaaucaaauggcuugaauaucacagacggggcauuccucaaccuaaaaaaccuaagggaguuacugcuugaagacaaccaguuaccccaaauacccucugguuugccagagucuuugacagaacuuagucuaauucaaaacaauauauacaacauaacuaaagagggcauuucaagacuuauaaacuugaaaaaucucuauuuggccuggaacugcuauuuuaacaaaguuugcgagaaaacuaacauagaagauggaguauuugaaacgcugacaaauuuggaguugcuaucacuaucuuucaauucucuuucacacgugccacccaaacugccaagcucccuacgcaaacuuuuucugagcaacacccagaucaaauacauuagugaagaagauuucaagggauugauaaauuuaacauuacuagauuuaagcgggaacuguccgaggugcuucaaugccccauuuccaugcgugccuugugaugguggugcuucaauuaauauagaucguuuugcuuuucaaaacuugacccaacuucgauaccuaaaccucucuagcacuucccucaggaagauuaaugcugccugguuuaaaaauaugccucaucugaaggugcuggaucuugaauucaacuauuuagugggagaaauagccucuggggcauuuuuaacgaugcugccccgcuuagaaauacuugacuugucuuuuaacuauauaaaggggaguuauccacagcauauuaauauuuccagaaacuucucuaaacuuuugucucuacgggcauugcauuuaagagguuauguguuccaggaacucagagaagaugauuuccagccccugaugcagcuuccaaacuuaucgacuaucaacuuggguauuaauuuuauuaagcaaaucgauuucaaacuuuuccaaaauuucuccaaucuggaaauuauuuacuugucagaaaacagaauaucaccguugguaaaagauacccggcagaguuaugcaaauaguuccucuuuucaacgucauauccggaaacgacgcucaacagauuuugaguuugacccacauucgaacuuuuaucauuucacccguccuuuaauaaagccacaaugugcugcuuauggaaaagccuuagauuuaagccucaacaguauuuucuucauugggccaaaccaauuugaaaaucuuccugacauugccuguuuaaaucugucugcaaauagcaaugcucaaguguuaaguggaacugaauuuucagccauuccucaugucaaauauuuggauuugacaaacaauagacuagacuuugauaaugcuagugcucuuacugaauuguccgacuuggaaguucuagaucucagcuauaauucacacuauuucagaauagcaggcguaacacaucaucuagaauuuauucaaaauuucacaaaucuaaaaguuuuaaacuugagccacaacaacauuuauacuuuaacagauaaguauaaccuggaaagcaagucccugguagaauuaguuuucaguggcaaucgccuugacauuuuguggaaugaugaugacaacagguauaucuccauuuucaaaggucucaagaaucugacacgucuggauuuaucccuuaauaggcugaagcacaucccaaaugaagcauuccuuaauuugccagcgagucucacugaacuacauauaaaugauaauauguuaaaguuuuuuaacuggacauuacuccagcaguucccucgucucgaguugcuugacuuacguggaaacaaacuacucuuuuuaacugauagccuaucugacuuuacaucuucccuucggacacugcugcugagucauaacaggauuucccaccuacccucuggcuuucuuucugaagucaguagucugaagcaccucgauuuaaguuccaaucugcuaaaaacaaucaacaaauccgcacuugaaacuaagaccaccaccaaauuaucuauguuggaacuacacggaaaccccuuugaaugcaccugugacauuggagauuuccgaagauggauggaugaacaucugaaugucaaaauucccagacugguagaugucauuugugccaguccuggggaucaaagagggaagaguauugugagucuggagcugacaacuuguguuucagaugucacugcagugauauuauuuuucuucacguucuuuaucaccaccaugguuauguuggcugcccuggcucaccauuuguuuuacugggauguuugguuuauauauaauguguguuuagcuaagguaaaaggcuacaggucucuuuccacaucccaaacuuucuaugaugcuuacauuucuuaugacaccaaagaugccucuguuacugacugggugauaaaugagcugcgcuaccaccuugaagagagccgagacaaaaacguucuccuuugucuagaggagagggauugggacccgggauuggccaucaucgacaaccucaugcagagcaucaaccaaagcaagaaaacaguauuuguuuuaaccaaaaaauaugcaaaaagcuggaacuuuaaaacagcuuuuuacuuggcuuugcagaggcuaauggaugagaacauggaugugauuauauuuauccugcuggagccaguguuacagcauucucaguauuugaggcuacggcagcggaucuguaagagcuccauccuccaguggccugacaacccgaaggcagaaggcuuguuuuggcaaacucugagaaauguggucuugacugaaaaugauucacgguauaacaauauguaugucgauuccauuaagcaauacuaa

SEQ ID NO: 9797 - RNA, 3126 nt, Artificial Sequence
  derived and/or modified sequence opt1 from TLR8__Homo_sapiens__AAF78036
auggagaacauguuccugcagagcuccaugcugaccugcaucuuccugcugaucagcggcuccugcgagcucugcgccgaggagaacuucagccgcuccuaccccugcgacgagaagaagcagaacgacagcgugaucgccgagugcuccaaccggcgccugcaggaggucccgcagaccguggggaaguacgugacggagcuggaccucagcgacaacuucaucacccacaucaccaacgaguccuuccagggccugcagaaccugaccaagaucaaccucaaccacaaccccaacguccagcaccagaacgggaaccccggcauccagagcaacgggcugaacaucacggacggcgcguuccugaaccucaagaaccugcgggagcugcuccuggaggacaaccagcugccccagaucccguccggccuccccgagagccugaccgagcugucccucauccagaacaacaucuacaacaucaccaaggaggggaucagccgccugaucaaccugaagaaccucuaccuggccuggaacugcuacuucaacaaggugugcgagaagaccaacaucgaggacggcguguucgagacgcugaccaaccucgagcugcugucccucagcuucaacucccugagccacgucccgcccaagcugcccuccagccuccggaagcuguuccugagcaacacccagaucaaguacaucuccgaggaggacuucaaggggcucaucaaccugacccugcucgaccugagcggcaacugcccccgcugcuucaacgcccccuuccccugcgugccgugcgacgggggcgccuccaucaacaucgaccgguucgccuuccagaaccugacgcagcuccgcuaccugaaccugagcuccaccagccuccggaagaucaacgcggccugguucaagaacaugccccaccugaaggugcuggaccucgaguucaacuaccuggucggcgagaucgccuccggggccuuccugaccaugcugccccgccucgagauccuggaccugagcuucaacuacaucaagggcuccuacccccagcacaucaacaucagccggaacuucuccaagcuccugagccugcgcgcgcuccaccuccggggguacguguuccaggagcugcgcgaggacgacuuccagccgcucaugcagcugcccaaccuguccaccaucaaccucggcaucaacuucaucaagcagaucgacuucaagcuguuccagaacuucagcaaccuggagaucaucuaccucuccgagaaccggaucagcccccuggugaaggacacgcgccaguccuacgccaacagcuccagcuuccagcggcacauccgcaagcggcgcagcaccgacuucgaguucgacccccacuccaacuucuaccacuucacccggccgcugaucaagccccagugcgccgccuacggcaaggcccucgaccugagccugaacuccaucuucuucaucgggcccaaccaguucgagaaccuccccgacaucgcgugccugaaccugagcgccaacuccaacgcccagguccucagcggcaccgaguucuccgccaucccgcacgugaaguaccuggaccugacgaacaaccgccucgacuucgacaacgccagcgcgcugaccgagcuguccgaccucgaggugcuggaccugagcuacaacucccacuacuuccgcaucgccggggucacccaccaccucgaguucauccagaacuucaccaaccugaaggugcugaaccucagccacaacaacaucuacacgcugaccgacaaguacaaccuggaguccaagagccucguggagcuggucuucuccggcaaccggcuggacauccucuggaacgacgacgacaaccgcuacaucagcaucuucaaggggcugaagaaccugacccggcucgaccugucccugaaccgccucaagcacauccccaacgaggccuuccugaaccugcccgccagccucaccgagcugcacaucaacgacaacaugcugaaguucuucaacuggacgcuccugcagcaguucccccggcuggagcuccuggaccugcgcggcaacaagcuccuguuccugaccgacagccucuccgacuucaccagcucccugcggacccugcuccugagccacaaccgcaucucccaccucccgagcggcuuccuguccgaggugagcucccugaagcaccuggaccucagcuccaaccugcugaagacgaucaacaagagcgcccucgagaccaagaccaccacgaagcuguccaugcuggagcuccacgggaaccccuucgagugcacgugcgacaucggcgacuuccggcgcuggauggacgagcaccugaacgugaagaucccccggcuggucgacgugaucugcgcgagcccgggggaccagcgcggcaaguccaucgugagccucgagcugacgaccugcgucuccgacgugaccgccgucauccuguucuucuucaccuucuucaucaccaccauggugaugcucgccgcccuggcccaccaccuguucuacugggacgugugguucaucuacaacgucugccucgcgaaggugaagggguaccggagccuguccaccagccagaccuucuacgacgccuacaucagcuacgacaccaaggacgccuccgugaccgacugggucaucaacgagcugcgcuaccaccucgaggagagccgggacaagaacgugcugcugugccucgaggagcgcgacugggaccccggccuggccaucaucgacaaccugaugcaguccaucaaccagagcaagaagaccguguucguccugacgaagaaguacgcgaaguccuggaacuucaagaccgccuucuaccucgcccugcagcggcugauggacgagaacauggacgugaucaucuucauccuccuggagcccgugcugcagcacagccaguaccuccgccugcggcagcgcaucugcaaguccagcauccugcaguggcccgacaacccgaaggccgagggccucuucuggcagacccugcgcaacgucgugcugaccgagaacgacucccgguacaacaacauguacguggacagcaucaagcaguacuga

SEQ ID NO: 9798 - RNA, 3126 nt, Artificial Sequence
  derived and/or modified sequence opt2 from TLR8__Homo_sapiens__AAF78036
auggagaacauguuccuccaguccuccaugcucaccugcaucuuccuccucaucuccggcuccugcgagcucugcgccgaggagaacuucucccgcuccuaccccugcgacgagaagaagcagaacgacuccgucaucgccgagugcuccaaccgccgccuccaggaggucccccagaccgucggcaaguacgucaccgagcucgaccucuccgacaacuucaucacccacaucaccaacgaguccuuccagggccuccagaaccucaccaagaucaaccucaaccacaaccccaacguccagcaccagaacggcaaccccggcauccaguccaacggccucaacaucaccgacggcgccuuccucaaccucaagaaccuccgcgagcuccuccucgaggacaaccagcucccccagauccccuccggccuccccgagucccucaccgagcucucccucauccagaacaacaucuacaacaucaccaaggagggcaucucccgccucaucaaccucaagaaccucuaccucgccuggaacugcuacuucaacaaggucugcgagaagaccaacaucgaggacggcgucuucgagacccucaccaaccucgagcuccucucccucuccuucaacucccucucccacgucccccccaagcuccccuccucccuccgcaagcucuuccucuccaacacccagaucaaguacaucuccgaggaggacuucaagggccucaucaaccucacccuccucgaccucuccggcaacugcccccgcugcuucaacgcccccuuccccugcguccccugcgacggcggcgccuccaucaacaucgaccgcuucgccuuccagaaccucacccagcuccgcuaccucaaccucuccuccaccucccuccgcaagaucaacgccgccugguucaagaacaugccccaccucaagguccucgaccucgaguucaacuaccucgucggcgagaucgccuccggcgccuuccucaccaugcucccccgccucgagauccucgaccucuccuucaacuacaucaagggcuccuacccccagcacaucaacaucucccgcaacuucuccaagcuccucucccuccgcgcccuccaccuccgcggcuacgucuuccaggagcuccgcgaggacgacuuccagccccucaugcagcuccccaaccucuccaccaucaaccucggcaucaacuucaucaagcagaucgacuucaagcucuuccagaacuucuccaaccucgagaucaucuaccucuccgagaaccgcaucuccccccucgucaaggacacccgccaguccuacgccaacuccuccuccuuccagcgccacauccgcaagcgccgcuccaccgacuucgaguucgacccccacuccaacuucuaccacuucacccgcccccucaucaagccccagugcgccgccuacggcaaggcccucgaccucucccucaacuccaucuucuucaucggccccaaccaguucgagaaccuccccgacaucgccugccucaaccucuccgccaacuccaacgcccagguccucuccggcaccgaguucuccgccaucccccacgucaaguaccucgaccucaccaacaaccgccucgacuucgacaacgccuccgcccucaccgagcucuccgaccucgagguccucgaccucuccuacaacucccacuacuuccgcaucgccggcgucacccaccaccucgaguucauccagaacuucaccaaccucaagguccucaaccucucccacaacaacaucuacacccucaccgacaaguacaaccucgaguccaagucccucgucgagcucgucuucuccggcaaccgccucgacauccucuggaacgacgacgacaaccgcuacaucuccaucuucaagggccucaagaaccucacccgccucgaccucucccucaaccgccucaagcacauccccaacgaggccuuccucaaccuccccgccucccucaccgagcuccacaucaacgacaacaugcucaaguucuucaacuggacccuccuccagcaguucccccgccucgagcuccucgaccuccgcggcaacaagcuccucuuccucaccgacucccucuccgacuucaccuccucccuccgcacccuccuccucucccacaaccgcaucucccaccuccccuccggcuuccucuccgaggucuccucccucaagcaccucgaccucuccuccaaccuccucaagaccaucaacaaguccgcccucgagaccaagaccaccaccaagcucuccaugcucgagcuccacggcaaccccuucgagugcaccugcgacaucggcgacuuccgccgcuggauggacgagcaccucaacgucaagaucccccgccucgucgacgucaucugcgccucccccggcgaccagcgcggcaaguccaucgucucccucgagcucaccaccugcgucuccgacgucaccgccgucauccucuucuucuucaccuucuucaucaccaccauggucaugcucgccgcccucgcccaccaccucuucuacugggacgucugguucaucuacaacgucugccucgccaaggucaagggcuaccgcucccucuccaccucccagaccuucuacgacgccuacaucuccuacgacaccaaggacgccuccgucaccgacugggucaucaacgagcuccgcuaccaccucgaggagucccgcgacaagaacguccuccucugccucgaggagcgcgacugggaccccggccucgccaucaucgacaaccucaugcaguccaucaaccaguccaagaagaccgucuucguccucaccaagaaguacgccaaguccuggaacuucaagaccgccuucuaccucgcccuccagcgccucauggacgagaacauggacgucaucaucuucauccuccucgagcccguccuccagcacucccaguaccuccgccuccgccagcgcaucugcaaguccuccauccuccaguggcccgacaaccccaaggccgagggccucuucuggcagacccuccgcaacgucguccucaccgagaacgacucccgcuacaacaacauguacgucgacuccaucaagcaguacuga

SEQ ID NO: 9799 - RNA, 3126 nt, Artificial Sequence
  derived and/or modified sequence opt3 from TLR8__Homo_sapiens__AAF78036
auggagaacauguuccugcagagcuccauguugaccugcaucuuucuucugauuucuggcucaugugaauugugcgccgaggaaaauuucaguagaagcuaccccugugacgagaagaaacaaaacgauuccgugauagcugaaugcucuaauaggcgguuacaggaggucccucagacaguugggaaguaugugacugagcuggaccuaucggauaacuuuaucacgcacauuaccaaugaaucauuccagggacuccaaaaccugacaaaaaucaaucuuaaccauaauccaaacguacagcaccagaaugguaacccgggcauucagagcaaugggcugaacaucacugacggagcauuuuugaaucucaagaaccugcgcgagcugcucuuagaagauaaccaacugccccagauaccuaguggccuuccagaguccuugaccgagcugucucuaauccagaauaacauuuacaauaucacaaaagaagguauuagccgacucaucaaccugaagaaucuuuaucuggccuggaacuguuacuucaauaaggugugcgagaaaaccaacauagaagacggggucuuugagacuuugacaaaucucgaacuguuaucccugucauucaacagucucagccaugugcccccuaaacuuccaucuucccugcguaaguuguuucuaucaaauacccagauuaaguauaucagcgaggaggauuucaaaggacugauuaaccucacgcugcuugaccugaguggcaauugucccagaugcuuuaacgcgccuuucccauguguuccgugcgauggcggggcuucuaucaauaucgacagguuugccuuccaaaacuugacucagcuccgguaccugaacuuauccagcaccucgcugcgcaagauuaaugcagccugguucaagaacaugccccaccuaaaagugcucgaucuggaauuuaauuaucuugucggagagauagcuucuggugcauucuugacaaugcugccuagacucgaaauccuggaccuuuccuuuaacuacauuaagggcucauacccacagcauaucaauauaaguaggaacuucagcaaacuguugucccuccgggcccugcacuuacgcggguauguguuucaagagcugcgagaagaugacuuccagccccuaaugcagcucccuaaucugucuacuauuaaccuuggaaucaauuuuaucaagcagauugacuucaaauuguuucaaaacuucagcaaucuggagaucauuuaccucucagagaacagaauaaguccacugguaaaggauaccaggcaguccuaugcuaauucuucuucauuucagcggcacauccguaaacgcagaaguacagacuucgaauuugauccccauagcaacuucuaccacuucaccaggccguuaauuaagccucagugugccgcguauggcaaggcacuggaccuuuccuugaauagcaucuuuuucaucggucccaaccaauuugagaaccucccagauauugccugccugaaucuaucggcuaacagcaaugcccagguucuguccgggacggaauuuucagcaauaccucaugugaaauaccucgaccugacuaacaaucggcuugauuuugacaacgcuagugccuugacagagcugucugauuuagaaguccucgaccugagcuauaauucccacuacuuccgaaucgcgggagugacccaccaucuugaguuuauucagaacuucacuaaucugaagguguugaaccucucacacaauaacaucuacacacugaccgauaaauauaaucuagagagcaagucucuggucgaacucguuuucuccggcaaccgccuggacauucuuuggaaugacgaugacaacagauacaucaguauauucaaaggcuugaagaaccugacgagguuagaucucagccugaaucggcuuaagcauauccccaacgaggccuuucugaaucuaccagcaucucucaccgaacugcacauuaacgacaauauguugaaauucuuuaacuggacacuguuacagcaauucccccgccucgagcugcuugaucugagagggaauaagcuccucuuccugacugacucccuaucagauuuuaccaguagccugaggacacuucuccugucgcauaaccguaucucccacuugccuucuggauuccugagcgaggugucaaguuuaaaacaccucgaccuguccucuaaucuucugaagacuauuaacaaaagcgcuuuggaaaccaagacaaccacuaagcucuccaugcuggagcuacaugguaauccauuugaaugcacgugugauaucggcgacuuccggcgauggauggaugagcaccugaacguaaaaauaccgagacuuguggacgucauuugcgccucacccggggaucagaggggaaagagcaucgugagucucgaacugacaaccuguguuucugacgugacugcugucauuuuguuuuucuuuaccuucuuuaucacaaccauggugauguuagccgcacuggcccaucaccucuucuauugggacguaugguuuauauacaauguuugccuggcuaaagugaagggcuaucgcucccuuagcacuucgcagacauucuacgaugcguauaucucauacgacacgaaagaugcaucugucaccgacugggugauuaacgagcugcgguaccacuuggaggaaaguagagauaagaauguccuacugugucucgaggaaagggacugggauccuggucuggccaucauugacaaccuuaugcaguccaucaaucaaagcaagaaaacuguguucguuuuaacaaagaaauaugcuaagucuuggaacuuuaaaaccgccuucuaccuggcacuccagcgcuugauggaugagaacauggacgugauaauuuuuauccugcucgaaccaguacugcagcauagccaauaucuucgacugcggcagcguaucugcaaguccucaauuuugcaguggcccgauaauccuaaagccgaggggcuauucuggcagacacugagaaacgucgugcucacugagaaugacaguagguacaacaauauguauguugauagcaucaagcaauacuga

SEQ ID NO: 9800 - RNA, 3126 nt, Artificial Sequence
  derived and/or modified sequence opt4 from TLR8__Homo_sapiens__AAF78036
auggagaacauguuccugcagagcagcaugcugaccugcaucuuccugcugaucagcggcagcugcgagcugugcgccgaggagaacuucagcagaagcuaccccugcgacgagaagaagcagaacgacagcgugaucgccgagugcagcaacagaagacugcaggaggugccccagaccgugggcaaguacgugaccgagcuggaccugagcgacaacuucaucacccacaucaccaacgagagcuuccagggccugcagaaccugaccaagaucaaccugaaccacaaccccaacgugcagcaccagaacggcaaccccggcauccagagcaacggccugaacaucaccgacggcgccuuccugaaccugaagaaccugagagagcugcugcuggaggacaaccagcugccccagauccccagcggccugcccgagagccugaccgagcugagccugauccagaacaacaucuacaacaucaccaaggagggcaucagcagacugaucaaccugaagaaccuguaccuggccuggaacugcuacuucaacaaggugugcgagaagaccaacaucgaggacggcguguucgagacccugaccaaccuggagcugcugagccugagcuucaacagccugagccacgugccccccaagcugcccagcagccugagaaagcuguuccugagcaacacccagaucaaguacaucagcgaggaggacuucaagggccugaucaaccugacccugcuggaccugagcggcaacugccccagaugcuucaacgcccccuuccccugcgugcccugcgacggcggcgccagcaucaacaucgacagauucgccuuccagaaccugacccagcugagauaccugaaccugagcagcaccagccugagaaagaucaacgccgccugguucaagaacaugccccaccugaaggugcuggaccuggaguucaacuaccuggugggcgagaucgccagcggcgccuuccugaccaugcugcccagacuggagauccuggaccugagcuucaacuacaucaagggcagcuacccccagcacaucaacaucagcagaaacuucagcaagcugcugagccugagagcccugcaccugagaggcuacguguuccaggagcugagagaggacgacuuccagccccugaugcagcugcccaaccugagcaccaucaaccugggcaucaacuucaucaagcagaucgacuucaagcuguuccagaacuucagcaaccuggagaucaucuaccugagcgagaacagaaucagcccccuggugaaggacaccagacagagcuacgccaacagcagcagcuuccagagacacaucagaaagagaagaagcaccgacuucgaguucgacccccacagcaacuucuaccacuucaccagaccccugaucaagccccagugcgccgccuacggcaaggcccuggaccugagccugaacagcaucuucuucaucggccccaaccaguucgagaaccugcccgacaucgccugccugaaccugagcgccaacagcaacgcccaggugcugagcggcaccgaguucagcgccaucccccacgugaaguaccuggaccugaccaacaacagacuggacuucgacaacgccagcgcccugaccgagcugagcgaccuggaggugcuggaccugagcuacaacagccacuacuucagaaucgccggcgugacccaccaccuggaguucauccagaacuucaccaaccugaaggugcugaaccugagccacaacaacaucuacacccugaccgacaaguacaaccuggagagcaagagccugguggagcugguguucagcggcaacagacuggacauccuguggaacgacgacgacaacagauacaucagcaucuucaagggccugaagaaccugaccagacuggaccugagccugaacagacugaagcacauccccaacgaggccuuccugaaccugcccgccagccugaccgagcugcacaucaacgacaacaugcugaaguucuucaacuggacccugcugcagcaguuccccagacuggagcugcuggaccugagaggcaacaagcugcuguuccugaccgacagccugagcgacuucaccagcagccugagaacccugcugcugagccacaacagaaucagccaccugcccagcggcuuccugagcgaggugagcagccugaagcaccuggaccugagcagcaaccugcugaagaccaucaacaagagcgcccuggagaccaagaccaccaccaagcugagcaugcuggagcugcacggcaaccccuucgagugcaccugcgacaucggcgacuucagaagauggauggacgagcaccugaacgugaagauccccagacugguggacgugaucugcgccagccccggcgaccagagaggcaagagcaucgugagccuggagcugaccaccugcgugagcgacgugaccgccgugauccuguucuucuucaccuucuucaucaccaccauggugaugcuggccgcccuggcccaccaccuguucuacugggacgugugguucaucuacaacgugugccuggccaaggugaagggcuacagaagccugagcaccagccagaccuucuacgacgccuacaucagcuacgacaccaaggacgccagcgugaccgacugggugaucaacgagcugagauaccaccuggaggagagcagagacaagaacgugcugcugugccuggaggagagagacugggaccccggccuggccaucaucgacaaccugaugcagagcaucaaccagagcaagaagaccguguucgugcugaccaagaaguacgccaagagcuggaacuucaagaccgccuucuaccuggcccugcagagacugauggacgagaacauggacgugaucaucuucauccugcuggagcccgugcugcagcacagccaguaccugagacugagacagagaaucugcaagagcagcauccugcaguggcccgacaaccccaaggccgagggccuguucuggcagacccugagaaacguggugcugaccgagaacgacagcagauacaacaacauguacguggacagcaucaagcaguacuga

SEQ ID NO: 9801 - RNA, 3126 nt, Artificial Sequence
  derived and/or modified sequence opt5 from TLR8__Homo_sapiens__AAF78036
auggagaacauguuccugcagagcuccaugcugaccugcaucuuucugcuuauuucuggcagcugugaacugugcgccgaggaaaauuucuccagaucuuaccccugugacgagaagaaacaaaacgauagcgugaucgcugaaugcuccaaucggcgccuccaggaggucccucagacaguugggaaguaugugacggagcuggaccuuucugauaacuuuauuacccacaucacaaaugaauccuuccagggacugcaaaaccucaccaaaauuaaucugaaccauaauccgaacgugcagcaccagaauggcaaccccgggauccaguccaauggacugaacaucacagacggcgccuuucucaaucugaagaaccuuagagagcugcuccuggaagauaaccaacuuccucagauucccagcgggcugccugagucucucaccgagcugucccugauccagaauaacauuuacaauaucacaaaagaaggaauuagccggcucaucaaccugaagaaucuuuaucuggcguggaacuguuacuucaauaaggucugcgagaaaaccaacauugaagacggcguguuugagacgcucaccaaucuggaacuucugucucucuccuucaacagccugucucauguucccccuaagcugccguccagccuccgcaaacuguuucuuuccaauacacagaucaaguauaucucugaggaggauuucaaaggccugauuaaccucacccugcuugaccugagcgggaauugucccagaugcuuuaacgcuccuuuccccugugugccuugcgauggaggcgccuccaucaauauugaccgguuugccuuccaaaaccucacacagcugcgcuaccugaaccucagcucuaccucccugagaaagaucaaugcugccugguucaagaacaugccccaccuuaaaguccuggaucucgaauuuaauuaucuggugggggagauugcuagcggagccuuccugacgaugcuuccgcggcucgaaauccuggaccugucuuuuaacuacaucaagggcagcuacccucagcauauuaauaucucccgcaacuucucuaaacuccugagccuuagagcgcugcaccuccggggguauguuuuucaagagcugcgcgaagaugacuuccagccccugaugcagcuuccuaaucucuccacaauuaaccugggaaucaauuuuauuaagcagaucgacuucaaacuguuucaaaacuucagcaaucucgagaucauuuaccugucugagaacagaaucagcccccuugugaaggauacccggcagagcuaugccaauucuuccagcuuucagcgccacauuagaaaacggagauccacagacuucgaauuugauccccauucuaacuucuaccacuucacccgcccucugaucaagccgcagugugcugccuauggcaaggcucucgaccugagccucaauuccauuuucuucaucggccccaaccaauuugagaaccuuccugauauugccugccucaaucugucugcgaacagcaaugcccagguccuguccgggaccgaauuuagcgcuaucccccaugugaaauaccucgaccugacaaacaaucggcuugauuuugacaacgccucugcucugacggagcucuccgaucuggaagugcuggaccuuagcuauaauucucacuacuucagaaucgccggagucacccaccaucucgaguuuauucagaacuucacaaaucugaagguucugaaccucucccacaauaacaucuacacccugacagauaaauauaaucuugagagcaagucucugguggaacucguguuuagcggcaaccgccuggacauucuguggaaugacgaugacaaccgguacaucuccauuuucaaagggcuuaagaaccugaccagacucgaucugagccucaaucgccugaagcauaucccuaacgaggccuuucuuaaucugcccgcuucucucacggaacugcacaucaacgacaauaugcugaaauucuuuaacuggacacuucugcagcaauucccgcggcucgagcugcucgaucugagaggaaauaaacuucuguuccucaccgacucccugagcgauuuuaccuccucucugcgcacacuucugcucagccauaaccggauuucccaucugccuucuggcuuccucagcgaggucuccucucugaagcaccuugaccugagcuccaaucugcucaagaccaucaacaaaagcgcgcuggaaacaaagacgaccacaaaacuuucuaugcuggagcuccacgggaaucccuuugaaugcaccugugauauuggagacuucagacgcuggauggaugagcaccugaacgugaagaucccucggcucguugacgugauuugcgccucccccggcgaucagagaggcaagagcaucgucucucuggaacuuacaaccuguguguccgacguuacggcugugauccuguuuuucuuuaccuucuuuauuacaaccauggucaugcuggccgcccucgcucaucaccuguucuauugggacgugugguuuaucuacaaugucugccuugccaaagugaagggguaucggagccugucuacaucccagaccuucuacgaugcguauauuagcuacgacacgaaagaugcuuccguuacagacugggugaucaacgagcuccgcuaccaccuggaggaaagcagagauaagaauguccuccugugucuugaggaacgggacugggauccuggacuggccauuaucgacaaccugaugcagucuaucaaucaaagcaagaaaaccguguucguucucacaaagaaauaugccaaguccuggaacuuuaaaaccgcuuucuaccuggcccuucagagacugauggaugagaacauggacgugauuaucuuuauucuccuggaacccguccuccagcauucucaauaucugcgccuucggcagagaaucugcaagagcuccauucugcaguggccggauaauccuaaagcugagggccuguucuggcagacccuccgcaacguggugcugacagagaaugacucuagauacaacaauauguauguugauagcaucaagcaauacuga

SEQ ID NO: 9802 - protein, 1032 aa, Artificial Sequence [sequence omitted]

SEQ ID NO: 9803 - RNA, 3099 nt, Artificial Sequence
  TLR9__Homo_sapiens__ABW37074
auggguuucugccgcagcgcccugcacccgcugucucuccuggugcaggccaucaugcuggccaugacccuggcccuggguaccuugccugccuuccuacccugugagcuccagccccacggccuggugaacugcaacuggcuguuccugaagucugugccccacuucuccacggcagcaccccguggcaaugucaccagccuuuccuuguccuccaaccgcauccaccaccuccaugauucugacuuugcccaccugcccagccugcggcaucucaaccucaaguggaacugcccgccgguuggccucagccccaugcacuuccccugccacaugaccaucgagcccagcaccuucuuggcugugcccacccuggaagagcuaaaccugagcuacaacaacaucaugacugugccugcgcugcccaaaucccucauaucccugucccucagccauaccaacauccugaugcuagacucugccagccucgccggccugcaugcccugcgcuuccuauucauggacggcaacuguuauuacaagaaccccugcaggcaggcacuggagguggccccgggugcccuccuuggccugggcaaccucacccaccugucacucaaguacaacaaccucacuguggugccccgcaaccugccuuccagccuggaguaucugcuguuguccuacaaccgcaucgucaaacuggcgccugaggaccuggccaaucugaccgcccugcgugugcucgaugugggcggaaauugccgccgcugcgaccacgcucccaaccccugcauggagugcccucgucacuucccccagcuacaucccgauaccuucagccaccugagccgucuugaaggccugguguugaaggacaguucucucuccuggcugaaugccaguugguuccgugggcugggaaaccuccgagugcuggaccugagugagaacuuccucuacaaaugcaucacuaaaaccaaggccuuccagggccuaacacagcugcgcaagcuuaaccuguccuucaauuaccaaaagaggguguccuuugcccaccugucucuggccccuuccuucgggagccuggucgcccugaaggagcuggacaugcacggcaucuucuuccgcucacucgaugagaccacgcuccggccacuggcccgccugcccaugcuccagacucugcgucugcagaugaacuucaucaaccaggcccagcucggcaucuucagggccuucccuggccugcgcuacguggaccugucggacaaccgcaucagcggagcuucggagcugacagccaccaugggggaggcagauggaggggagaaggucuggcugcagccuggggaccuugcuccggccccaguggacacucccagcucugaagacuucaggcccaacugcagcacccucaacuucaccuuggaucugucacggaacaaccuggugaccgugcagccggagauguuugcccagcucucgcaccugcagugccugcgccugagccacaacugcaucucgcaggcagucaauggcucccaguuccugccgcugaccggucugcaggugcuagaccugucccacaauaagcuggaccucuaccacgagcacucauucacggagcuaccgcgacuggaggcccuggaccucagcuacaacagccagcccuuuggcaugcagggcgugggccacaacuucagcuucguggcucaccugcgcacccugcgccaccucagccuggcccacaacaacauccacagccaagugucccagcagcucugcaguacgucgcugcgggcccuggacuucagcggcaaugcacugggccauaugugggccgagggagaccucuaucugcacuucuuccaaggccugagcgguuugaucuggcuggacuugucccagaaccgccugcacacccuccugccccaaacccugcgcaaccuccccaagagccuacaggugcugcgucuccgugacaauuaccuggccuucuuuaagugguggagccuccacuuccugcccaaacuggaaguccucgaccuggcaggaaaccagcugaaggcccugaccaauggcagccugccugcuggcacccggcuccggaggcuggaugucagcugcaacagcaucagcuucguggcccccggcuucuuuuccaaggccaaggagcugcgagagcucaaccuuagcgccaacgcccucaagacaguggaccacuccugguuugggccccuggcgagugcccugcaaauacuagauguaagcgccaacccucugcacugcgccuguggggcggccuuuauggacuuccugcuggaggugcaggcugccgugcccggucugcccagccgggugaaguguggcaguccgggccagcuccagggccucagcaucuuugcacaggaccugcgccucugccuggaugaggcccucuccugggacuguuucgcccucucgcugcuggcuguggcucugggccugggugugcccaugcugcaucaccucuguggcugggaccucugguacugcuuccaccugugccuggccuggcuucccuggcgggggcggcaaagugggcgagaugaggaugcccugcccuacgaugccuucguggucuucgacaaaacgcagagcgcaguggcagacuggguguacaacgagcuucgggggcagcuggaggagugccgugggcgcugggcacuccgccugugccuggaggaacgcgacuggcugccuggcaaaacccucuuugagaaccugugggccucggucuauggcagccgcaagacgcuguuugugcuggcccacacggaccgggucaguggucucuugcgcgccagcuuccugcuggcccagcagcgccugcuggaggaccgcaaggacgucguggugcuggugauccugagcccugacggccgccgcucccgcuacgugcggcugcgccagcgccucugccgccagaguguccuccucuggccccaccagcccaguggucagcgcagcuucugggcccagcugggcauggcccugaccagggacaaccaccacuucuauaaccggaacuucugccagggacccacggccgaauag

SEQ ID NO: 9804 - RNA, 3099 nt, Artificial Sequence
  derived and/or modified sequence opt1 from TLR9__Homo_sapiens__ABW37074
augggcuucugccgcagcgcccugcacccccucucccugcuggugcaggccaucaugcucgcgaugacccuggcccuggggacccucccggccuuccugcccugcgagcugcagccccacggccucgucaacugcaacuggcuguuccucaagagcgugccccacuucuccacggccgccccgcgggggaacgugaccagccugucccugagcuccaaccgcauccaccaccuccacgacagcgacuucgcgcaccuccccucccugcggcaccugaaccugaaguggaacugcccgcccgucggccugagccccaugcacuuccccugccacaugaccaucgagcccuccaccuuccuggccgugcccacgcucgaggagcugaaccugagcuacaacaacaucaugaccgugccggcccuccccaagucccugaucagccugucccucagccacaccaacauccugaugcuggacuccgccagccucgcggggcugcacgcccugcgcuuccucuucauggacggcaacugcuacuacaagaaccccugccggcaggcccuggaggucgcccccggcgcccugcucgggcugggcaaccugacccaccucucccugaaguacaacaaccugacgguggugccgcgcaaccuccccagcagccuggaguaccugcuccuguccuacaaccggaucgucaagcuggcgcccgaggaccucgccaaccugaccgcccugcgcgugcuggacgucgggggcaacugccggcgcugcgaccacgcccccaacccgugcauggagugcccccggcacuucccccagcuccaccccgacaccuucagccaccugucccgccuggaggggcucgugcugaaggacagcucccugagcuggcucaacgccuccugguuccggggccugggcaaccugcgcgugcucgaccugagcgagaacuuccuguacaagugcaucaccaagacgaaggcguuccaggggcucacccagcugcggaagcugaaccucuccuucaacuaccagaagcgcgugagcuucgcccaccugucccuggccccgagcuucggcucccucgucgcccugaaggagcuggacaugcacgggaucuucuuccggagccucgacgagaccacccugcgcccccuggcccggcuccccaugcugcagacgcugcgccuccagaugaacuucaucaaccaggcgcagcugggcaucuuccgggccuuccccggccugcgcuacguggaccucuccgacaaccgcaucagcggggccuccgagcugaccgccaccaugggcgaggccgacgggggcgagaagguguggcugcagccgggggaccucgcgcccgcccccgucgacaccccgagcuccgaggacuuccggcccaacugcagcacgcugaacuucacccuggaccucagccgcaacaaccuggugaccgugcagcccgagauguucgcccagcugucccaccuccagugccugcggcugagccacaacugcaucucccaggccgucaacggcagccaguuccucccccugaccggccuccaggugcuggaccugucccacaacaagcuggaccucuaccacgagcacagcuucacggagcugccgcgccuggaggcgcucgaccuguccuacaacagccagcccuucgggaugcagggcguggggcacaacuucuccuucgucgcccaccuccggacccugcgccaccugagccuggcccacaacaacauccacucccaggugagccagcagcucugcuccaccagccugcgggcccuggacuucuccggcaacgcccucgggcacaugugggcggagggcgaccuguaccugcacuucuuccagggccucagcgggcugaucuggcuggaccucucccagaaccgccugcacacccugcucccccagacgcugcggaaccugcccaagagccuccagguccugcgccugcgggacaacuaccucgccuucuucaagugguggagccugcacuuccugccgaagcucgaggugcuggaccuggccggcaaccagcucaaggcccugaccaacgggucccugcccgccggcacccgccuccggcgccuggacgugagcugcaacuccaucagcuucgucgcgcccggguucuucuccaaggccaaggagcugcgggagcucaaccugagcgccaacgcccugaagaccguggaccacuccugguucggcccccucgccagcgcgcugcagauccuggacguguccgccaacccgcuccacugcgccugcggcgccgcguucauggacuuccugcuggagguccaggccgccgugcccgggcugcccagccgcgugaagugcggcucccccgggcagcuccagggccugagcaucuucgcccaggaccugcggcucugccuggacgaggcccuguccugggacugcuucgcgcucagccugcuggccgucgcccucggccugggggugccgaugcugcaccaccucugcggcugggaccugugguacugcuuccaccugugccucgccuggcugcccuggcgcgggcggcaguccggccgcgacgaggacgcccugcccuacgacgcguucguggucuucgacaagacgcagagcgccguggccgacuggguguacaacgagcuccgcgggcagcuggaggagugccggggccgcugggcccugcggcucugccuggaggagcgcgacuggcugcccggcaagacccucuucgagaaccugugggccuccgucuacgggagccggaagacccuguucgugcucgcgcacaccgaccgcguguccggccugcugcgggccagcuuccuccuggcccagcagcgccugcucgaggaccggaaggacgucguggugcuggucauccugagcccggacgggcgccggucccgcuacgugcggcuccgccagcggcugugccgccagagcgugcugcucuggccccaccagcccuccggccagcggagcuucugggcccagcuggggauggcgcugacgcgcgacaaccaccacuucuacaaccggaacuucugccagggccccaccgccgaguga

SEQ ID NO: 9805 - RNA, 3099 nt, Artificial Sequence
  derived and/or modified sequence opt2 from TLR9__Homo_sapiens__ABW37074
augggcuucugccgcuccgcccuccacccccucucccuccucguccaggccaucaugcucgccaugacccucgcccucggcacccuccccgccuuccuccccugcgagcuccagccccacggccucgucaacugcaacuggcucuuccucaaguccgucccccacuucuccaccgccgccccccgcggcaacgucaccucccucucccucuccuccaaccgcauccaccaccuccacgacuccgacuucgcccaccuccccucccuccgccaccucaaccucaaguggaacugcccccccgucggccucucccccaugcacuuccccugccacaugaccaucgagcccuccaccuuccucgccguccccacccucgaggagcucaaccucuccuacaacaacaucaugaccguccccgcccuccccaagucccucaucucccucucccucucccacaccaacauccucaugcucgacuccgccucccucgccggccuccacgcccuccgcuuccucuucauggacggcaacugcuacuacaagaaccccugccgccaggcccucgaggucgcccccggcgcccuccucggccucggcaaccucacccaccucucccucaaguacaacaaccucaccgucgucccccgcaaccuccccuccucccucgaguaccuccuccucuccuacaaccgcaucgucaagcucgcccccgaggaccucgccaaccucaccgcccuccgcguccucgacgucggcggcaacugccgccgcugcgaccacgcccccaaccccugcauggagugcccccgccacuucccccagcuccaccccgacaccuucucccaccucucccgccucgagggccucguccucaaggacuccucccucuccuggcucaacgccuccugguuccgcggccucggcaaccuccgcguccucgaccucuccgagaacuuccucuacaagugcaucaccaagaccaaggccuuccagggccucacccagcuccgcaagcucaaccucuccuucaacuaccagaagcgcgucuccuucgcccaccucucccucgcccccuccuucggcucccucgucgcccucaaggagcucgacaugcacggcaucuucuuccgcucccucgacgagaccacccuccgcccccucgcccgccuccccaugcuccagacccuccgccuccagaugaacuucaucaaccaggcccagcucggcaucuuccgcgccuuccccggccuccgcuacgucgaccucuccgacaaccgcaucuccggcgccuccgagcucaccgccaccaugggcgaggccgacggcggcgagaaggucuggcuccagcccggcgaccucgcccccgcccccgucgacacccccuccuccgaggacuuccgccccaacugcuccacccucaacuucacccucgaccucucccgcaacaaccucgucaccguccagcccgagauguucgcccagcucucccaccuccagugccuccgccucucccacaacugcaucucccaggccgucaacggcucccaguuccucccccucaccggccuccagguccucgaccucucccacaacaagcucgaccucuaccacgagcacuccuucaccgagcucccccgccucgaggcccucgaccucuccuacaacucccagcccuucggcaugcagggcgucggccacaacuucuccuucgucgcccaccuccgcacccuccgccaccucucccucgcccacaacaacauccacucccaggucucccagcagcucugcuccaccucccuccgcgcccucgacuucuccggcaacgcccucggccacaugugggccgagggcgaccucuaccuccacuucuuccagggccucuccggccucaucuggcucgaccucucccagaaccgccuccacacccuccucccccagacccuccgcaaccuccccaagucccuccagguccuccgccuccgcgacaacuaccucgccuucuucaagugguggucccuccacuuccuccccaagcucgagguccucgaccucgccggcaaccagcucaaggcccucaccaacggcucccuccccgccggcacccgccuccgccgccucgacgucuccugcaacuccaucuccuucgucgcccccggcuucuucuccaaggccaaggagcuccgcgagcucaaccucuccgccaacgcccucaagaccgucgaccacuccugguucggcccccucgccuccgcccuccagauccucgacgucuccgccaacccccuccacugcgccugcggcgccgccuucauggacuuccuccucgagguccaggccgccguccccggccuccccucccgcgucaagugcggcucccccggccagcuccagggccucuccaucuucgcccaggaccuccgccucugccucgacgaggcccucuccugggacugcuucgcccucucccuccucgccgucgcccucggccucggcguccccaugcuccaccaccucugcggcugggaccucugguacugcuuccaccucugccucgccuggcuccccuggcgcggccgccaguccggccgcgacgaggacgcccuccccuacgacgccuucgucgucuucgacaagacccaguccgccgucgccgacugggucuacaacgagcuccgcggccagcucgaggagugccgcggccgcugggcccuccgccucugccucgaggagcgcgacuggcuccccggcaagacccucuucgagaaccucugggccuccgucuacggcucccgcaagacccucuucguccucgcccacaccgaccgcgucuccggccuccuccgcgccuccuuccuccucgcccagcagcgccuccucgaggaccgcaaggacgucgucguccucgucauccucucccccgacggccgccgcucccgcuacguccgccuccgccagcgccucugccgccaguccguccuccucuggccccaccagcccuccggccagcgcuccuucugggcccagcucggcauggcccucacccgcgacaaccaccacuucuacaaccgcaacuucugccagggccccaccgccgaguga

SEQ ID NO: 9806 - RNA, 3099 nt, Artificial Sequence
  derived and/or modified sequence opt3 from TLR9__Homo_sapiens__ABW37074
augggcuucugcagaagcgcccugcacccccucucccuucuggugcaggcuaucauguuggcaaugaccuuagcccuggggacacuaccugcguuucucccaugugagcugcaaccgcauggacuugucaacugcaauuggcuguucuugaagucuguuccccacuuuucaacugcugccccuagggguaacgugacgagucucagccuguccucuaaucggauucaucaccuucaugacucggauuucgcacaccucccaucauuacgccaccugaaccuuaaauggaauugucccccuguaggcuugagcccaaugcauuuucccugccacaugaccauagaaccuaguacauuccuggccgugccaacucuagaggaacucaaccuguccuacaauaacaucaugaccgucccggcucugcccaagucucugauuagcuugucccucucacauacaaauauccugauguuagacagugcaagccuggccgggcuccacgcucugcgauuucuguucauggauggaaacuguuauuacaaaaauccuugccgucaggccuuggagguggcgccaggcgcacuacugggucucgggaaccugacccaccuuucucugaaguauaauaacuugacuguugugcccagaaaucucccuuccucacuggaauacuuacugcuaagcuauaacaggauugucaaacucgccccagaggaccuggcuaaccuuacagccuugcgggugcuggauguaggaggcaauugucgcagaugcgaccaugcacccaacccguguauggagugcccuaggcacuuuccccagcuccauccagauaccuucagucaccugucucggcuugaaggccugguuuugaaggacuccagccucucguggcugaaugcuucuugguuucgcggguuaggaaaccugcgagugcuagaucucuccgagaauuuccuguacaaguguaucacgaaaacuaaggccuuucagggucuuacccaauugagaaaacugaaccucucauucaauuaucagaagagggucaguuucgcgcaucugagcuuagccccuuccuuuggcucucugguggcacuuaaagaauuggacaugcacgggauauucuuucggagccucgaugagacaacucugcguccccuagcucgccugccaaugcuccagacccugagacuucagaugaacuucaucaaucaagcccaguugggaauuuuuagggcuuuccccggccugcgguacguggacuuaucagauaaccgaaucaguggugccuccgagcucacagcaaccaugggggaagccgacggaggcgagaaggucuggcugcagccuggcgaccuugcuccagcgccgguugauacgcccagcucugaagacuuucgcccuaauugcucaacucugaacuucacauuggaucucaguagaaauaaccuggugaccguacagccagagauguuugcacaacuaagccaccuucagugccucaggcugucccauaauuguauuucucaggccgugaacgggucgcaauuccuucccuugacuggacugcaggucuuagaccucagccacaacaagcuggaucuuuaccaugaacacuccuuuacagagcugccucggcuagaggcucucgaccugucauauaauagucagccauucgguaugcagggcguggggcacaacuuuucuuucguugcccauuugcgcacccugagacacuuaagccucgcacauaauaacauccacucccaagugucacagcagcugugcagcacgucucuuagggcccuggauuucuccggaaaugcuuugggccauaugugggccgaaggugaccucuaccugcacuuuuuccaggggcuaaguggccugauauggcuugaucucagccaaaaccgucugcacaccuugcugccccagacauuacggaaucucccgaaaucucugcagguccuucgacugagagacaacuauuuggcauuuuucaagugguggucccuccauuuucugccuaaacuagaggugcuggaucuugcgggaaaucagcucaaggcucugacuaacggcucauugccagccgggaccagguuacgccggcuggacguaaguuguaauagcauuucguucguugcacccggauuuuucuccaaagccaaggaacucagagagcugaaccuuucugcuaaugcccugaaaacaguggaccacagcugguuugguccuuuggcaucagcucuacaaauccuggaugucagugccaacccccuccauugcgcguguggcgccgcuuucauggacuuucugcuugaagugcaggcagccgucccaggguuaccuuccagggugaagugcggaucucccggccagcugcagggucucagcauuuucgcucaagauuugcgccugugucucgacgaggcccuguccugggauugcuuugcacuuucacuguuggcgguugcccuagggcugggcgugccaaugcuccaccauuuauguggaugggaccugugguacugcuuccaccuuugucuggcuuggcucccguggcgaggccggcagagcgggcgugaugaggacgccuugccuuaugaugcauucguagucuuugacaagacucagagugcuguggccgauuggguuuacaaugaacugagaggacaacucgaggaaugcaggggucgcugggcacugcggcuuugccuagaggaaagagacuggcugcccggcaaaaccuuguucgagaacuuaugggccucuguguauggguccaggaagacacuguuuguccucgcucacaccgaucgagugagcggacugcuucgcgcgucguuccugcucgcccagcagcgguugcuggaggacagaaaagacguagugguucuagucauccugucaccagauggcaggcguucucgcuacgugcggcucagacagaggcuuugucgacaaagugugcuguuauggccccaucagccuuccggucagcggagcuuuugggcacaguuggggauggcucugacucgcgacaaccaccauuucuacaauagaaacuuuugccaaggcccaacggccgaauga

SEQ ID NO: 9807 - RNA, 3099 nt, Artificial Sequence
  derived and/or modified sequence opt4 from TLR9__Homo_sapiens__ABW37074
augggcuucugcagaagcgcccugcacccccugagccugcuggugcaggccaucaugcuggccaugacccuggcccugggcacccugcccgccuuccugcccugcgagcugcagccccacggccuggugaacugcaacuggcuguuccugaagagcgugccccacuucagcaccgccgcccccagaggcaacgugaccagccugagccugagcagcaacagaauccaccaccugcacgacagcgacuucgcccaccugcccagccugagacaccugaaccugaaguggaacugcccccccgugggccugagccccaugcacuuccccugccacaugaccaucgagcccagcaccuuccuggccgugcccacccuggaggagcugaaccugagcuacaacaacaucaugaccgugcccgcccugcccaagagccugaucagccugagccugagccacaccaacauccugaugcuggacagcgccagccuggccggccugcacgcccugagauuccuguucauggacggcaacugcuacuacaagaaccccugcagacaggcccuggagguggcccccggcgcccugcugggccugggcaaccugacccaccugagccugaaguacaacaaccugaccguggugcccagaaaccugcccagcagccuggaguaccugcugcugagcuacaacagaaucgugaagcuggcccccgaggaccuggccaaccugaccgcccugagagugcuggacgugggcggcaacugcagaagaugcgaccacgcccccaaccccugcauggagugccccagacacuucccccagcugcaccccgacaccuucagccaccugagcagacuggagggccuggugcugaaggacagcagccugagcuggcugaacgccagcugguucagaggccugggcaaccugagagugcuggaccugagcgagaacuuccuguacaagugcaucaccaagaccaaggccuuccagggccugacccagcugagaaagcugaaccugagcuucaacuaccagaagagagugagcuucgcccaccugagccuggcccccagcuucggcagccugguggcccugaaggagcuggacaugcacggcaucuucuucagaagccuggacgagaccacccugagaccccuggccagacugcccaugcugcagacccugagacugcagaugaacuucaucaaccaggcccagcugggcaucuucagagccuuccccggccugagauacguggaccugagcgacaacagaaucagcggcgccagcgagcugaccgccaccaugggcgaggccgacggcggcgagaagguguggcugcagcccggcgaccuggcccccgcccccguggacacccccagcagcgaggacuucagacccaacugcagcacccugaacuucacccuggaccugagcagaaacaaccuggugaccgugcagcccgagauguucgcccagcugagccaccugcagugccugagacugagccacaacugcaucagccaggccgugaacggcagccaguuccugccccugaccggccugcaggugcuggaccugagccacaacaagcuggaccuguaccacgagcacagcuucaccgagcugcccagacuggaggcccuggaccugagcuacaacagccagcccuucggcaugcagggcgugggccacaacuucagcuucguggcccaccugagaacccugagacaccugagccuggcccacaacaacauccacagccaggugagccagcagcugugcagcaccagccugagagcccuggacuucagcggcaacgcccugggccacaugugggccgagggcgaccuguaccugcacuucuuccagggccugagcggccugaucuggcuggaccugagccagaacagacugcacacccugcugccccagacccugagaaaccugcccaagagccugcaggugcugagacugagagacaacuaccuggccuucuucaagugguggagccugcacuuccugcccaagcuggaggugcuggaccuggccggcaaccagcugaaggcccugaccaacggcagccugcccgccggcaccagacugagaagacuggacgugagcugcaacagcaucagcuucguggcccccggcuucuucagcaaggccaaggagcugagagagcugaaccugagcgccaacgcccugaagaccguggaccacagcugguucggcccccuggccagcgcccugcagauccuggacgugagcgccaacccccugcacugcgccugcggcgccgccuucauggacuuccugcuggaggugcaggccgccgugcccggccugcccagcagagugaagugcggcagccccggccagcugcagggccugagcaucuucgcccaggaccugagacugugccuggacgaggcccugagcugggacugcuucgcccugagccugcuggccguggcccugggccugggcgugcccaugcugcaccaccugugcggcugggaccugugguacugcuuccaccugugccuggccuggcugcccuggagaggcagacagagcggcagagacgaggacgcccugcccuacgacgccuucgugguguucgacaagacccagagcgccguggccgacuggguguacaacgagcugagaggccagcuggaggagugcagaggcagaugggcccugagacugugccuggaggagagagacuggcugcccggcaagacccuguucgagaaccugugggccagcguguacggcagcagaaagacccuguucgugcuggcccacaccgacagagugagcggccugcugagagccagcuuccugcuggcccagcagagacugcuggaggacagaaaggacgugguggugcuggugauccugagccccgacggcagaagaagcagauacgugagacugagacagagacugugcagacagagcgugcugcuguggccccaccagcccagcggccagagaagcuucugggcccagcugggcauggcccugaccagagacaaccaccacuucuacaacagaaacuucugccagggccccaccgccgaguga

SEQ ID NO: 9808 - RNA, 3099 nt, Artificial Sequence
  derived and/or modified sequence opt5 from TLR9__Homo_sapiens__ABW37074
augggcuucugcagaagcgcccugcacccccucucccugcuugugcaggcuaucaugcuggccaugacccucgcgcuggggacacuuccugcuuuucugccgugugagcuccaaccccauggacuggucaacugcaauuggcuguuccucaagucuguuccucacuuuagcacggccgcuccccggggcaacgugaccucccugucucuuagcuccaaucgcauucaucaucugcacgacucugauuucgcucaccucccuagccugagacaccuuaaccugaaauggaauugucccccuguggggcucuccccgaugcauuuucccugccacaugacaaucgaaccuagcaccuuccuggccguccccacacuggaggaacucaaccugucuuacaauaacauuaugaccgugccugcucugcccaagucccugaucagccucucucugucccauacaaauauucuuaugcuggacagcgccucucucgcgggacugcacgcccugcgguuucucuucauggauggcaacuguuauuacaaaaauccgugccgccaggcucuggagguugccccuggggcccuucugggacucggcaaccugacccaccuuucccugaaguauaauaaccucacggugguccccagaaaucugccuagcucccuggaauaccuccugcuuucuuauaaccggaucgugaaacuggcccccgaggaccucgcgaaccugaccgcccugcgcguucuugaugugggcgggaauuguagacggugcgaccaugcucccaacccuuguauggagugcccgcgccacuuuccccagcuccauccugauacauucagccaccuguccagacuggaaggacucguccugaaggacagcucucuuuccuggcugaaugccagcugguuucggggccucgggaaccugcgcgugcuggaucuuucugagaauuuccucuacaaguguaucaccaaaacaaaggcuuuucagggacugacccaacugagaaaacucaaccugagcuucaauuaucagaagcggguguccuucgcccaucuuucucuggcccccagcuuuggcucccucgucgcucugaaagaacuggacaugcacgggauuuucuuucgcagccuugaugagacgacacucagaccucuggcgcggcugcccaugcuccagacccugagacuucagaugaacuucaucaaucaagcccagcugggaauuuuucgcgcuuucccgggccuccgguacguugaccugucugauaacagaaucuccggcgccagcgagcugacagccaccaugggggaagcugacggaggcgagaagguguggcuucagccuggggaccucgcccccgcgccuguggauacccccucuuccgaagacuuucgcccuaauugcagcacacugaacuucacgcuggaucucucccggaauaaccuggucaccgugcagcccgagauguuugcucaacuuucucaucugcagugccucagacugagccacaauuguauuucccaggccguuaacggaucucaauuccugccgcuuacaggccuucaggugcucgaccugagccacaacaagcucgaucuguaccaugaacacuccuuuaccgagcuuccucgccuggaggcccucgaccugagcuauaauucucagcccuucgggaugcagggagucggccacaacuuuuccuucguggcucaucugcggacacuuagacaccugagccucgcccauaauaacauccacucucaaguuucccagcagcugugcagcaccucucuccgcgcucuggauuucagcggcaaugcccuugggcauaugugggcggaaggagaccuguaccuccacuuuuuccagggccuguccgggcugauuuggcuugaucugagccaaaaccggcuccacacgcugcucccccagacacugagaaaucuuccuaaaucucuccaggugcugcgccugcgggacaacuaucuggccuuuuucaagugguggucccuucauuuucugccgaaacucgagguccuggaucucgcuggaaaucagcugaaggcccuuaccaacggcagccugcccgcugggaccagacugcggcgccucgacguguccuguaauucuaucagcuucgucgccccuggcuuuuucuccaaagcgaaggaacugagagagcuuaaccugucugccaaugcucucaaaacaguggaccacagcugguuuggaccccuggccuccgcucuccaaauccuggauguuucugccaacccucuucauugcgccuguggcgcugcguucauggacuuucugcuggaagugcaggccgcuguccccgggcucccuagccgggugaagugcggaucccccggccagcugcaggggcuuagcauuuucgcccaagaucugagacucugucuggacgaggcccucucuugggauugcuuugcucugucccuucuggccguugcgcugggacucggcgugccgaugcugcaccaucuuugugggugggaccugugguacugcuuccaccucugucuggcuuggcugccuuggcgcggccggcagagcggaagagaugaggacgcccuccccuaugaugccuucgucguguuugacaagacccagucugcuguggccgauuggguuuacaaugaacuucgcggccaacuggaggaaugcagagggcggugggcgcugcgccucugccuggaggaaagagacuggcuuccuggaaaaacacuguucgagaaccucugggcuuccgucuauggcagccggaagacgcuguuugugcuggcccacaccgaucgcgugucugggcuccuuagagccuccuuccugcuggcucagcagcggcuccuggaggaccgcaaagacgucgugguucuugugauccugagccccgauggaagacggucccgcuacgucagacuccggcagagacugugucgccaaagcgugcugcucuggccgcaucagccuucuggccagcggagcuuuugggcccagcuugggauggcucugacaagagacaaccaccauuucuacaaucgcaacuuuugccaaggccccaccgccgaauga

SEQ ID NO: 9809 - protein, 1032 aa, Artificial Sequence [sequence omitted]

SEQ ID NO: 9810 - RNA, 3099 nt, Artificial Sequence
  TLR9__Homo_sapiens__AAZ95518
auggguuucugccgcagcgcccugcacccgcugucucuccuggugcaggccaucaugcuggccaugacccuggcccuggguaccuugccugccuuccuacccugugagcuccagccccacggccuggugaacugcaacuggcuguuccugaagucugugccccacuucuccauggcagcaccccguggcaaugucaccagccuuuccuuguccuccaaccgcauccaccaccuccaugauucugacuuugcccaccugcccagccugcggcaucucaaccucaaguggaacugcccgccgguuggccucagccccaugcacuuccccugccacaugaccaucgagcccagcaccuucuuggcugugcccacccuggaagagcuaaaccugagcuacaacaacaucaugacugugccugcgcugcccaaaucccucauaucccugucccucagccauaccaacauccugaugcuagacucugccagccucgccggccugcaugcccugcgcuuccuauucauggacggcaacuguuauuacaagaaccccugcaggcaggcacuggagguggccccgggugcccuccuuggccugggcaaccucacccaccugucacucaaguacaacaaccucacuguggugccccgcaaccugccuuccagccuggaguaucugcuguuguccuacaaccgcaucgucaaacuggcgccugaggaccuggccaaucugaccgcccugcgugugcucgaugugggcggaaauugccgccgcugcgaccacgcucccaaccccugcauggagugcccucgucacuucccccagcuacaucccgauaccuucagccaccugagccgucuugaaggccugguguugaaggacaguucucucuccuggcugaaugccaguugguuccgugggcugggaaaccuccgagugcuggaccugagugagaacuuccucuacaaaugcaucacuaaaaccaaggccuuccagggccuaacacagcugcgcaagcuuaaccuguccuucaauuaccaaaagaggguguccuuugcccaccugucucuggccccuuccuucgggagccuggucgcccugaaggagcuggacaugcacggcaucuucuuccgcucacucgaugagaccacacuccggccacuggcccgccugcccaugcuccagacucugcgucugcagaugaacuucaucaaccaggcccagcucggcaucuucagggccuucccuggccugcgcuacguggaccugucggacaaccgcaucagcggagcuucggagcugacagccaccaugggggaggcagauggaggggagaaggucuggcugcagccuggggaccuugcuccggccccaguggacacucccagcucugaagacuucaggcccaacugcagcacccucaacuucaccuuggaucugucacggaacaaccuggugaccgugcagccggagauguuugcccagcucucgcaccugcagugccugcgccugagccacaacugcaucucacaggcagucaauggcucccaguuccugccgcugaccggucugcaggugcuagaccugucccacaauaagcuggaccucuaccacgagcacucauucacggagcuaccgcgacuggaggcccuggaccucagcuacaacagccagcccuuuggcaugcagggcgugggccacaacuucagcuucguggcucaccugcgcacccugcgccaccucagccuggcccacaacaacauccacagccaagugucccagcagcucugcaguacgucgcugcgggcccuggacuucagcggcaaugcacugggccauaugugggccgagggagaccucuaucugcacuucuuccaaggccugagcgguuugaucuggcuggacuugucccagaaccgccugcacacccuccugccccaaacccugcgcaaccuccccaagagccuacaggugcugcgucuccgugacaauuaccuggccuucuuuaagugguggagccuccacuuccugcccaaacuggaaguccucgaccuggcaggaaaccagcugaaggcccugaccaauggcagccugccugcuggcacccggcuccggaggcuggaugucagcugcaacagcaucagcuucguggcccccggcuucuuuuccaaggccaaggagcugcgagagcucaaccuuagcgccaacgcccucaagacaguggaccacuccugguuugggccccuggcgagugcccugcaaauacuagauguaagcgccaacccucugcacugcgccuguggggcggccuuuauggacuuccugcuggaggugcaggcugccgugcccggucugcccagccgggugaaguguggcaguccgggccagcuccagggccucagcaucuuugcacaggaccugcgccucugccuggaugaggcccucuccugggacuguuucgcccucucgcugcuggcuguggcucugggccugggugugcccaugcugcaucaccucuguggcugggaccucugguacugcuuccaccugugccuggccuggcuucccuggcgggggcggcaaagugggcgagaugaggaugcccugcccuacgaugccuucguggucuucgacaaaacgcagagcgcaguggcagacuggguguacaacgagcuucgggggcagcuggaggagugccgugggcgcugggcacuccaccugugccuggaggaacgcgacuggcugccuggcaaaacccucuuugagaaccugugggccucggucuauggcagccgcaagacgcuguuugugcuggcccacacggaccgggucaguggucucuugcgcgccagcuuccugcuggcccagcagcgccugcuggaggaccgcaaggacgucguggugcuggugauccugagcccugacggccgccgcucccgcuacgugcggcugcgccagcgccucugccgccagaguguccuccucuggccccaccagcccaguggucagcgcagcuucugggcccagcugggcauggcccugaccagggacaaccaccacuucuauaaccggaacuucugccagggacccacggccgaauag

SEQ ID NO: 9811 - RNA, 3099 nt, Artificial Sequence
  derived and/or modified sequence opt1 from TLR9__Homo_sapiens__AAZ95518
augggcuucugccgcagcgcccugcacccccucucccugcuggugcaggccaucaugcucgcgaugacccuggcccuggggacccucccggccuuccugcccugcgagcugcagccccacggccucgucaacugcaacuggcuguuccugaaguccgugccccacuucagcauggccgccccgcgggggaacgugacgagccucucccugagcuccaaccgcauccaccaccuccacgacagcgacuucgcgcaccuccccucccugcggcaccugaaccucaaguggaacugcccgcccgucggccugagccccaugcacuuccccugccacaugaccaucgagcccuccaccuuccuggccgugcccacccucgaggagcugaaccugagcuacaacaacaucaugacggugccggcccuccccaagucccugaucagccugucccucagccacaccaacauccugaugcuggacuccgccagccucgcggggcugcacgcccugcgcuuccucuucauggacggcaacugcuacuacaagaaccccugccggcaggcccuggaggucgcccccggcgcccugcucgggcugggcaaccugacccaccucucccugaaguacaacaaccugaccguggugccgcgcaaccuccccagcagccuggaguaccugcuccuguccuacaaccggaucgucaagcuggcgcccgaggaccucgccaaccugacggcccugcgcgugcuggacgucgggggcaacugccggcgcugcgaccacgcccccaacccgugcauggagugcccccggcacuucccccagcuccaccccgacaccuucagccaccugucccgccuggaggggcucgugcugaaggacagcucccugagcuggcucaacgccuccugguuccggggccugggcaaccugcgcgugcucgaccugagcgagaacuuccuguacaagugcaucaccaagaccaaggcguuccaggggcucacgcagcugcggaagcugaaccucuccuucaacuaccagaagcgcgugagcuucgcccaccugucccuggccccgagcuucggcucccucgucgcccugaaggagcuggacaugcacgggaucuucuuccggagccucgacgagaccacccugcgcccccuggcccggcuccccaugcugcagacccugcgccuccagaugaacuucaucaaccaggcgcagcugggcaucuuccgggccuuccccggccugcgcuacguggaccucuccgacaaccgcaucagcggggccuccgagcugacggccaccaugggcgaggccgacgggggcgagaagguguggcugcagccgggggaccucgcgcccgcccccgucgacaccccgagcuccgaggacuuccggcccaacugcagcacccugaacuucacgcuggaccucagccgcaacaaccuggugaccgugcagcccgagauguucgcccagcugucccaccuccagugccugcggcugagccacaacugcaucucccaggccgucaacggcagccaguuccucccccugaccggccuccaggugcuggaccugucccacaacaagcuggaccucuaccacgagcacagcuucaccgagcugccgcgccuggaggcgcucgaccuguccuacaacagccagcccuucgggaugcagggcguggggcacaacuucuccuucgucgcccaccuccggacgcugcgccaccugagccuggcccacaacaacauccacucccaggugagccagcagcucugcuccaccagccugcgggcccuggacuucuccggcaacgcccucgggcacaugugggcggagggcgaccuguaccugcacuucuuccagggccucagcgggcugaucuggcuggaccucucccagaaccgccugcacacccugcucccccagacccugcggaaccugcccaagagccuccagguccugcgccugcgggacaacuaccucgccuucuucaagugguggagccugcacuuccugccgaagcucgaggugcuggaccuggccggcaaccagcucaaggcccugacgaacgggucccugcccgccggcacccgccuccggcgccuggacgugagcugcaacuccaucagcuucgucgcgcccggguucuucuccaaggccaaggagcugcgggagcucaaccugagcgccaacgcccugaagaccguggaccacuccugguucggcccccucgccagcgcgcugcagauccuggacguguccgccaacccgcuccacugcgccugcggcgccgcguucauggacuuccugcuggagguccaggccgccgugcccgggcugcccagccgcgugaagugcggcucccccgggcagcuccagggccugagcaucuucgcccaggaccugcggcucugccuggacgaggcccuguccugggacugcuucgcgcucagccugcuggccgucgcccucggccugggggugccgaugcugcaccaccucugcggcugggaccugugguacugcuuccaccugugccucgccuggcugcccuggcgcgggcggcaguccggccgcgacgaggacgcccugcccuacgacgcguucguggucuucgacaagacccagagcgccguggccgacuggguguacaacgagcuccgcgggcagcuggaggagugccggggccgcugggcccugcaccucugccuggaggagcgggacuggcugcccggcaagacgcuguucgagaaccugugggccuccgucuacgggagccgcaagacccuguucgugcucgcgcacaccgaccggguguccggccugcugcgcgccagcuuccuccuggcccagcagcggcugcucgaggaccgcaaggacgucguggugcuggucauccugagcccggacgggcggcgcucccgguacgugcgccuccggcagcgccugugccggcagagcgugcugcucuggccccaccagcccuccggccagcgcagcuucugggcccagcuggggauggcgcugacccgggacaaccaccacuucuacaaccgcaacuucugccagggccccacggccgaguga

SEQ ID NO: 9812 - RNA, 3099 nt, Artificial Sequence
  derived and/or modified sequence opt2 from TLR9__Homo_sapiens__AAZ95518
augggcuucugccgcuccgcccuccacccccucucccuccucguccaggccaucaugcucgccaugacccucgcccucggcacccuccccgccuuccuccccugcgagcuccagccccacggccucgucaacugcaacuggcucuuccucaaguccgucccccacuucuccauggccgccccccgcggcaacgucaccucccucucccucuccuccaaccgcauccaccaccuccacgacuccgacuucgcccaccuccccucccuccgccaccucaaccucaaguggaacugcccccccgucggccucucccccaugcacuuccccugccacaugaccaucgagcccuccaccuuccucgccguccccacccucgaggagcucaaccucuccuacaacaacaucaugaccguccccgcccuccccaagucccucaucucccucucccucucccacaccaacauccucaugcucgacuccgccucccucgccggccuccacgcccuccgcuuccucuucauggacggcaacugcuacuacaagaaccccugccgccaggcccucgaggucgcccccggcgcccuccucggccucggcaaccucacccaccucucccucaaguacaacaaccucaccgucgucccccgcaaccuccccuccucccucgaguaccuccuccucuccuacaaccgcaucgucaagcucgcccccgaggaccucgccaaccucaccgcccuccgcguccucgacgucggcggcaacugccgccgcugcgaccacgcccccaaccccugcauggagugcccccgccacuucccccagcuccaccccgacaccuucucccaccucucccgccucgagggccucguccucaaggacuccucccucuccuggcucaacgccuccugguuccgcggccucggcaaccuccgcguccucgaccucuccgagaacuuccucuacaagugcaucaccaagaccaaggccuuccagggccucacccagcuccgcaagcucaaccucuccuucaacuaccagaagcgcgucuccuucgcccaccucucccucgcccccuccuucggcucccucgucgcccucaaggagcucgacaugcacggcaucuucuuccgcucccucgacgagaccacccuccgcccccucgcccgccuccccaugcuccagacccuccgccuccagaugaacuucaucaaccaggcccagcucggcaucuuccgcgccuuccccggccuccgcuacgucgaccucuccgacaaccgcaucuccggcgccuccgagcucaccgccaccaugggcgaggccgacggcggcgagaaggucuggcuccagcccggcgaccucgcccccgcccccgucgacacccccuccuccgaggacuuccgccccaacugcuccacccucaacuucacccucgaccucucccgcaacaaccucgucaccguccagcccgagauguucgcccagcucucccaccuccagugccuccgccucucccacaacugcaucucccaggccgucaacggcucccaguuccucccccucaccggccuccagguccucgaccucucccacaacaagcucgaccucuaccacgagcacuccuucaccgagcucccccgccucgaggcccucgaccucuccuacaacucccagcccuucggcaugcagggcgucggccacaacuucuccuucgucgcccaccuccgcacccuccgccaccucucccucgcccacaacaacauccacucccaggucucccagcagcucugcuccaccucccuccgcgcccucgacuucuccggcaacgcccucggccacaugugggccgagggcgaccucuaccuccacuucuuccagggccucuccggccucaucuggcucgaccucucccagaaccgccuccacacccuccucccccagacccuccgcaaccuccccaagucccuccagguccuccgccuccgcgacaacuaccucgccuucuucaagugguggucccuccacuuccuccccaagcucgagguccucgaccucgccggcaaccagcucaaggcccucaccaacggcucccuccccgccggcacccgccuccgccgccucgacgucuccugcaacuccaucuccuucgucgcccccggcuucuucuccaaggccaaggagcuccgcgagcucaaccucuccgccaacgcccucaagaccgucgaccacuccugguucggcccccucgccuccgcccuccagauccucgacgucuccgccaacccccuccacugcgccugcggcgccgccuucauggacuuccuccucgagguccaggccgccguccccggccuccccucccgcgucaagugcggcucccccggccagcuccagggccucuccaucuucgcccaggaccuccgccucugccucgacgaggcccucuccugggacugcuucgcccucucccuccucgccgucgcccucggccucggcguccccaugcuccaccaccucugcggcugggaccucugguacugcuuccaccucugccucgccuggcuccccuggcgcggccgccaguccggccgcgacgaggacgcccuccccuacgacgccuucgucgucuucgacaagacccaguccgccgucgccgacugggucuacaacgagcuccgcggccagcucgaggagugccgcggccgcugggcccuccaccucugccucgaggagcgcgacuggcuccccggcaagacccucuucgagaaccucugggccuccgucuacggcucccgcaagacccucuucguccucgcccacaccgaccgcgucuccggccuccuccgcgccuccuuccuccucgcccagcagcgccuccucgaggaccgcaaggacgucgucguccucgucauccucucccccgacggccgccgcucccgcuacguccgccuccgccagcgccucugccgccaguccguccuccucuggccccaccagcccuccggccagcgcuccuucugggcccagcucggcauggcccucacccgcgacaaccaccacuucuacaaccgcaacuucugccagggccccaccgccgaguga

SEQ ID NO: 9813 - RNA, 3099 nt, Artificial Sequence
  derived and/or modified sequence opt3 from TLR9__Homo_sapiens__AAZ95518
augggcuucugcagaagcgcccugcacccccucucccuucuggugcaggcuaucauguuggcaaugaccuuagcccuggggacacuaccugcguuucucccaugugagcugcaaccgcauggacuugucaacugcaauuggcuguucuugaagucuguuccccacuuuucaauggcugccccuagggguaacgugacuagccucagccuguccucuaaucggauucaucaccuucaugacucggauuucgcacaccucccaucauuacgccaccugaaccuuaaauggaauugucccccuguaggcuugagcccaaugcauuuucccugccacaugacgauagaaccuaguaccuuccuggccgugccaacacuagaggaacucaaccuguccuacaauaacaucaugacugucccggcucugcccaagucucugauuagcuugucccucucacauaccaauauccugauguuagacagugcaagccuggccgggcuccacgcucugcgauuucuguucauggauggaaacuguuauuacaaaaauccuugccgucaggccuuggagguggcgccaggcgcacuacugggucucgggaaccugacacaccuuucucugaaguauaauaacuugaccguugugcccagaaaucucccuuccucacuggaauacuuacugcuaagcuauaacaggauugucaaacucgccccagaggaccuggcuaaccuuacugccuugcgggugcuggauguaggaggcaauugucgcagaugcgaccaugcacccaacccguguauggagugcccuaggcacuuuccccagcuccauccagauacauucagucaccugucucggcuugaaggccugguuuugaaggacuccagccucucguggcugaaugcuucuugguuucgcggguuaggaaaccugcgagugcuagaucucuccgagaauuuccuguacaaguguaucaccaaaacgaaggccuuucagggucuuacucaauugagaaaacugaaccucucauucaauuaucagaagagggucaguuucgcgcaucugagcuuagccccuuccuuuggcucucugguggcacuuaaagaauuggacaugcacgggauauucuuucggagccucgaugagaccacacugcguccccuagcucgccugccaaugcuccagacucugagacuucagaugaacuucaucaaucaagcccaguugggaauuuuuagggcuuuccccggccugcgguacguggacuuaucagauaaccgaaucaguggugccuccgagcucaccgcaacaaugggggaagccgacggaggcgagaaggucuggcugcagccuggcgaccuugcuccagcgccgguugauacccccagcucugaagacuuucgcccuaauugcucaacgcugaacuucacuuuggaucucaguagaaauaaccuggugacaguacagccagagauguuugcacaacuaagccaccuucagugccucaggcugucccauaauuguauuucucaggccgugaacgggucgcaauuccuucccuugaccggacugcaggucuuagaccucagccacaacaagcuggaucuuuaccaugaacacuccuuuacugagcugccucggcuagaggcucucgaccugucauauaauagucagccauucgguaugcagggcguggggcacaacuuuucuuucguugcccauuugcgcacacugagacacuuaagccucgcacauaauaacauccacucccaagugucacagcagcugugcagcaccucucuuagggcccuggauuucuccggaaaugcuuugggccauaugugggccgaaggugaccucuaccugcacuuuuuccaggggcuaaguggccugauauggcuugaucucagccaaaaccgucugcacacguugcugccccagaccuuacggaaucucccgaaaucucugcagguccuucgacugagagacaacuauuuggcauuuuucaagugguggucccuccauuuucugccuaaacuagaggugcuggaucuugcgggaaaucagcucaaggcucugacaaacggcucauugccagccgggacuagguuacgccggcuggacguaaguuguaauagcauuucguucguugcacccggauuuuucuccaaagccaaggaacucagagagcugaaccuuucugcuaaugcccugaaaaccguggaccacagcugguuugguccuuuggcaucagcucuacaaauccuggaugucagugccaacccccuccauugcgcguguggcgccgcuuucauggacuuucugcuugaagugcaggcagccgucccaggguuaccuuccagggugaagugcggaucucccggccagcugcagggucucagcauuuucgcucaagauuugcgccugugucucgacgaggcccuguccugggauugcuuugcacuuucacuguuggcgguugcccuagggcugggcgugccaaugcuccaccauuuauguggaugggaccugugguacugcuuccaccuuugucuggcuuggcucccguggcgaggccggcagagcgggcgugaugaggacgccuugccuuaugaugcauucguagucuuugacaagacacagagugcuguggccgauuggguuuacaaugaacugagaggacaacucgaggaaugcaggggucgcugggcacugcaccuuugccuagaggaacgggacuggcugcccggcaaaacuuuguucgagaacuuaugggccucuguguauggguccagaaagacccuguuuguccucgcucauacagauagggugagcggacugcuucgagcgucguuccugcucgcccagcagcgcuugcuggaggaccggaaagacguagugguucuagucauccugucaccagauggcagaaggucucguuacgugcgccuccggcagagacuuuguaggcaaagugugcuguuauggccccaccagccuuccggucagcgaaguuuuugggcacaguuggggauggcucugacccgggacaaccaucacuucuacaaucgcaacuuuugccaaggcccaacugccgaauga

SEQ ID NO: 9814 - RNA, 3099 nt, Artificial Sequence
  derived and/or modified sequence opt4 from TLR9__Homo_sapiens__AAZ95518
augggcuucugcagaagcgcccugcacccccugagccugcuggugcaggccaucaugcuggccaugacccuggcccugggcacccugcccgccuuccugcccugcgagcugcagccccacggccuggugaacugcaacuggcuguuccugaagagcgugccccacuucagcauggccgcccccagaggcaacgugaccagccugagccugagcagcaacagaauccaccaccugcacgacagcgacuucgcccaccugcccagccugagacaccugaaccugaaguggaacugcccccccgugggccugagccccaugcacuuccccugccacaugaccaucgagcccagcaccuuccuggccgugcccacccuggaggagcugaaccugagcuacaacaacaucaugaccgugcccgcccugcccaagagccugaucagccugagccugagccacaccaacauccugaugcuggacagcgccagccuggccggccugcacgcccugagauuccuguucauggacggcaacugcuacuacaagaaccccugcagacaggcccuggagguggcccccggcgcccugcugggccugggcaaccugacccaccugagccugaaguacaacaaccugaccguggugcccagaaaccugcccagcagccuggaguaccugcugcugagcuacaacagaaucgugaagcuggcccccgaggaccuggccaaccugaccgcccugagagugcuggacgugggcggcaacugcagaagaugcgaccacgcccccaaccccugcauggagugccccagacacuucccccagcugcaccccgacaccuucagccaccugagcagacuggagggccuggugcugaaggacagcagccugagcuggcugaacgccagcugguucagaggccugggcaaccugagagugcuggaccugagcgagaacuuccuguacaagugcaucaccaagaccaaggccuuccagggccugacccagcugagaaagcugaaccugagcuucaacuaccagaagagagugagcuucgcccaccugagccuggcccccagcuucggcagccugguggcccugaaggagcuggacaugcacggcaucuucuucagaagccuggacgagaccacccugagaccccuggccagacugcccaugcugcagacccugagacugcagaugaacuucaucaaccaggcccagcugggcaucuucagagccuuccccggccugagauacguggaccugagcgacaacagaaucagcggcgccagcgagcugaccgccaccaugggcgaggccgacggcggcgagaagguguggcugcagcccggcgaccuggcccccgcccccguggacacccccagcagcgaggacuucagacccaacugcagcacccugaacuucacccuggaccugagcagaaacaaccuggugaccgugcagcccgagauguucgcccagcugagccaccugcagugccugagacugagccacaacugcaucagccaggccgugaacggcagccaguuccugccccugaccggccugcaggugcuggaccugagccacaacaagcuggaccuguaccacgagcacagcuucaccgagcugcccagacuggaggcccuggaccugagcuacaacagccagcccuucggcaugcagggcgugggccacaacuucagcuucguggcccaccugagaacccugagacaccugagccuggcccacaacaacauccacagccaggugagccagcagcugugcagcaccagccugagagcccuggacuucagcggcaacgcccugggccacaugugggccgagggcgaccuguaccugcacuucuuccagggccugagcggccugaucuggcuggaccugagccagaacagacugcacacccugcugccccagacccugagaaaccugcccaagagccugcaggugcugagacugagagacaacuaccuggccuucuucaagugguggagccugcacuuccugcccaagcuggaggugcuggaccuggccggcaaccagcugaaggcccugaccaacggcagccugcccgccggcaccagacugagaagacuggacgugagcugcaacagcaucagcuucguggcccccggcuucuucagcaaggccaaggagcugagagagcugaaccugagcgccaacgcccugaagaccguggaccacagcugguucggcccccuggccagcgcccugcagauccuggacgugagcgccaacccccugcacugcgccugcggcgccgccuucauggacuuccugcuggaggugcaggccgccgugcccggccugcccagcagagugaagugcggcagccccggccagcugcagggccugagcaucuucgcccaggaccugagacugugccuggacgaggcccugagcugggacugcuucgcccugagccugcuggccguggcccugggccugggcgugcccaugcugcaccaccugugcggcugggaccugugguacugcuuccaccugugccuggccuggcugcccuggagaggcagacagagcggcagagacgaggacgcccugcccuacgacgccuucgugguguucgacaagacccagagcgccguggccgacuggguguacaacgagcugagaggccagcuggaggagugcagaggcagaugggcccugcaccugugccuggaggagagagacuggcugcccggcaagacccuguucgagaaccugugggccagcguguacggcagcagaaagacccuguucgugcuggcccacaccgacagagugagcggccugcugagagccagcuuccugcuggcccagcagagacugcuggaggacagaaaggacgugguggugcuggugauccugagccccgacggcagaagaagcagauacgugagacugagacagagacugugcagacagagcgugcugcuguggccccaccagcccagcggccagagaagcuucugggcccagcugggcauggcccugaccagagacaaccaccacuucuacaacagaaacuucugccagggccccaccgccgaguga

SEQ ID NO: 9815 - RNA, 3099 nt, Artificial Sequence
  derived and/or modified sequence opt5 from TLR9__Homo_sapiens__AAZ95518
augggcuucugcagaagcgcccugcacccccucucccugcuugugcaggcuaucaugcuggccaugacccucgcgcuggggacacuuccugcuuuucugccgugugagcuccaaccccauggacuggucaacugcaauuggcuguuccucaagucuguuccucacuuuagcauggccgcuccccggggcaacgugacgucccugucucuuagcuccaaucgcauucaucaucugcacgacucugauuucgcucaccucccuagccugagacaccuuaaccugaaauggaauugucccccuguggggcucuccccgaugcauuuucccugccacaugaccaucgaaccuagcacauuccuggccguccccacccuggaggaacucaaccugucuuacaauaacauuaugacagugccugcucugcccaagucccugaucagccucucucugucccauaccaauauucuuaugcuggacagcgccucucucgcgggacugcacgcccugcgguuucucuucauggauggcaacuguuauuacaaaaauccgugccgccaggcucuggagguugccccuggggcccuucugggacucggcaaccugacacaccuuucccugaaguauaauaaccucaccgugguccccagaaaucugccuagcucccuggaauaccuccugcuuucuuauaaccggaucgugaaacuggcccccgaggaccucgcgaaccugacggcccugcgcguucuugaugugggcgggaauuguagacggugcgaccaugcucccaacccuuguauggagugcccgcgccacuuuccccagcuccauccugauaccuucagccaccuguccagacuggaaggacucguccugaaggacagcucucuuuccuggcugaaugccagcugguuucggggccucgggaaccugcgcgugcuggaucuuucugagaauuuccucuacaaguguaucacaaaaaccaaggcuuuucagggacugacacaacugagaaaacucaaccugagcuucaauuaucagaagcggguguccuucgcccaucuuucucuggcccccagcuuuggcucccucgucgcucugaaagaacuggacaugcacgggauuuucuuucgcagccuugaugagaccacgcucagaccucuggcgcggcugcccaugcuccagacacugagacuucagaugaacuucaucaaucaagcccagcugggaauuuuucgcgcuuucccgggccuccgguacguugaccugucugauaacagaaucuccggcgccagcgagcugaccgccacaaugggggaagcugacggaggcgagaagguguggcuucagccuggggaccucgcccccgcgccuguggauacccccucuuccgaagacuuucgcccuaauugcagcacccugaacuucacacuggaucucucccggaauaaccuggucacggugcagcccgagauguuugcucaacuuucucaucugcagugccucagacugagccacaauuguauuucccaggccguuaacggaucucaauuccugccgcuuaccggccuucaggugcucgaccugagccacaacaagcucgaucuguaccaugaacacuccuuuacagagcuuccucgccuggaggcccucgaccugagcuauaauucucagcccuucgggaugcagggagucggccacaacuuuuccuucguggcucaucugcggacccuuagacaccugagccucgcccauaauaacauccacucucaaguuucccagcagcugugcagcacaucucuccgcgcucuggauuucagcggcaaugcccuugggcauaugugggcggaaggagaccuguaccuccacuuuuuccagggccuguccgggcugauuuggcuugaucugagccaaaaccggcuccacacccugcucccccagacgcugagaaaucuuccuaaaucucuccaggugcugcgccugcgggacaacuaucuggccuuuuucaagugguggucccuucauuuucugccgaaacucgagguccuggaucucgcuggaaaucagcugaaggcccuuacaaacggcagccugcccgcugggaccagacugcggcgccucgacguguccuguaauucuaucagcuucgucgccccuggcuuuuucuccaaagcgaaggaacugagagagcuuaaccugucugccaaugcucucaaaaccguggaccacagcugguuuggaccccuggccuccgcucuccaaauccuggauguuucugccaacccucuucauugcgccuguggcgcugcguucauggacuuucugcuggaagugcaggccgcuguccccgggcucccuagccgggugaagugcggaucccccggccagcugcaggggcuuagcauuuucgcccaagaucugagacucugucuggacgaggcccucucuugggauugcuuugcucugucccuucuggccguugcgcugggacucggcgugccgaugcugcaccaucuuugugggugggaccugugguacugcuuccaccucugucuggcuuggcugccuuggcgcggccggcagagcggaagagaugaggacgcccuccccuaugaugccuucgucguguuugacaagacacagucugcuguggccgauuggguuuacaaugaacuucgcggccaacuggaggaaugcagagggcggugggcgcugcaccucugccuggaggaacgcgacuggcuuccuggaaaaacccuguucgagaaccucugggcuuccgucuauggcagcagaaagacacuguuugugcuggcccauacggaucgggugucugggcuccuucgcgccuccuuccugcuggcucagcagagacuccuggaggaccggaaagacgucgugguucuugugauccugagccccgauggacgcagaucccgguacguccgccucagacagcggcuguguagacaaagcgugcugcucuggccgcaccagccuucuggccagcgcagcuuuugggcccagcuugggauggcucugacccgggacaaccaucacuucuacaauagaaacuuuugccaaggccccacagccgaauga

SEQ ID NO: 9816 - protein, 1032 aa, Artificial Sequence [sequence omitted]

SEQ ID NO: 9817 - RNA, 3099 nt, Artificial Sequence
  TLR9__Homo_sapiens__AAZ95519
auggguuucugccgcagcgcccugcacccgcugucucuccuggugcaggccaucaugcuggccaugacccuggcccuggguaccuugccugccuuccuacccugugagcuccagccccacggccuggugaacugcaacuggcuguuccugaagucugugccccacuucuccauggcagcaccccguggcaaugucaccagccuuuccuuguccuccaaccgcauccaccaccuccaugauucugacuuugcccaccugcccagccugcggcaucucaaccucaaguggaacugcccgccgguuggccucagccccaugcacuuccccugccacaugaccaucgagcccagcaccuucuuggcugugcccacccuggaagagcuaaaccugagcuacaacaacaucaugacugugccugcgcugcccaaaucccucauaucccugucccucagccauaccaacauccugaugcuagacucugccagccucgccggccugcaugcccugcgcuuccuauucauggacggcaacuguuauuacaagaaccccugcaggcaggcacuggagguggccccgggugcccuccuuggccugggcaaccucacccaccugucacucaaguacaacaaccucacuguggugccccgcaaccugccuuccagccuggaguaucugcuguuguccuacaaccgcaucgucaaacuggcgccugaggaccuggccaaucugaccgcccugcgugugcucgaugugggcggaaauugccgccgcugcgaccacgcucccaaccccugcauggagugcccucgucacuucccccagcuacaucccgauaccuucagccaccugagccgucuugaaggccugguguugaaggacaguucucucuccuggcugaaugccaguugguuccgugggcugggaaaccuccaagugcuggaccugagugagaacuuccucuacaaaugcaucacuaaaaccaaggccuuccagggccuaacacagcugcgcaagcuuaaccuguccuucaauuaccaaaagaggguguccuuugcccaccugucucuggccccuuccuucgggagccuggucgcccugaaggagcuggacaugcacggcaucuucuuccgcucacucgaugagaccacgcuccggccacuggcccgccugcccaugcuccagacucugcgucugcagaugaacuucaucaaccaggcccagcucggcaucuucagggccuucccuggccugcgcuacguggaccugucggacaaccgcaucagcggagcuucggagcugacagccaccaugggggaggcagauggaggggagaaggucuggcugcagccuggggaccuugcuccggccccaguggacacucccagcucugaagacuucaggcccaacugcagcacccucaacuucaccuuggaucugucacggaacaaccuggugaccgugcagccggagauguuugcccagcucucgcaccugcagugccugcgccugagccacaacugcaucucgcaggcagucaauggcucccaguuccugccgcugaccggucugcaggugcuagaccugucccacaauaagcuggaccucuaccacgagcacucauucacggagcuaccacgacuggaggcccuggaccucagcuacaacagccagcccuuuggcaugcagggcgugggccacaacuucagcuucguggcucaccugcgcacccugcgccaccucagccuggcccacaacaacauccacagccaagugucccagcagcucugcaguacgucgcugcgggcccuggacuucagcggcaaugcacugggccauaugugggccgagggagaccucuaucugcacuucuuccaaggccugagcgguuugaucuggcuggacuugucccagaaccgccugcacacccuccugccccaaacccugcgcaaccuccccaagagccuacaggugcugcgucuccgugacaauuaccuggccuucuuuaagugguggagccuccacuuccugcccaaacuggaaguccucgaccuggcaggaaaccagcugaaggcccugaccaauggcagccugccugcuggcacccggcuccggaggcuggaugucagcugcaacagcaucagcuucguggcccccggcuucuuuuccaaggccaaggagcugcgagagcucaaccuuagcgccaacgcccucaagacaguggaccacuccugguuugggccccuggcgagugcccugcaaauacuagauguaagcgccaacccucugcacugcgccuguggggcggccuuuauggacuuccugcuggaggugcaggcugccgugcccggucugcccagccgggugaaguguggcaguccgggccagcuccagggccucagcaucuuugcacaggaccugcgccucugccuggaugaggcccucuccugggacuguuucgcccucucgcugcuggcuguggcucugggccugggugugcccaugcugcaucaccucuguggcugggaccucugguacugcuuccaccugugccuggccuggcuucccuggcgggggcggcaaagugggcgagaugaggaugcccugcccuacgaugccuucguggucuucgacaaaacgcagagcgcaguggcagacuggguguacaacgagcuucgggggcagcuggaggagugccgugggcgcugggcacuccgccugugccuggaggaacgcgacuggcugccuggcaaaacccucuuugagaaccugugggccucggucuauggcagccgcaagacgcuguuugugcuggcccacacggaccgggucaguggucucuugcgcgccagcuuccugcuggcccagcagcgccugcuggaggaccgcaaggacgucguggugcuggugauccugagcccugacggccgccgcucccgcuacgugcggcugcgccagcgccucugccgccagaguguccuccucuggccccaccagcccaguggucagcgcagcuucugggcccagcugggcauggcccugaccagggacaaccaccacuucuauaaccggaacuucugccagggacccacggccgaauag

SEQ ID NO: 9818 - RNA, 3099 nt, Artificial Sequence
  derived and/or modified sequence opt1 from TLR9__Homo_sapiens__AAZ95519
augggcuucugccgcagcgcccugcacccccucucccugcuggugcaggccaucaugcucgcgaugacccuggcccuggggacccucccggccuuccugcccugcgagcugcagccccacggccucgucaacugcaacuggcuguuccugaaguccgugccccacuucagcauggccgccccgcgggggaacgugacgagccucucccugagcuccaaccgcauccaccaccuccacgacagcgacuucgcgcaccuccccucccugcggcaccugaaccucaaguggaacugcccgcccgucggccugagccccaugcacuuccccugccacaugaccaucgagcccuccaccuuccuggccgugcccacccucgaggagcugaaccugagcuacaacaacaucaugacggugccggcccuccccaagucccugaucagccugucccucagccacaccaacauccugaugcuggacuccgccagccucgcggggcugcacgcccugcgcuuccucuucauggacggcaacugcuacuacaagaaccccugccggcaggcccuggaggucgcccccggcgcccugcucgggcugggcaaccugacccaccucucccugaaguacaacaaccugaccguggugccgcgcaaccuccccagcagccuggaguaccugcuccuguccuacaaccggaucgucaagcuggcgcccgaggaccucgccaaccugacggcccugcgcgugcuggacgucgggggcaacugccggcgcugcgaccacgcccccaacccgugcauggagugcccccggcacuucccccagcuccaccccgacaccuucagccaccugucccgccuggaggggcucgugcugaaggacagcucccugagcuggcucaacgccuccugguuccggggccugggcaaccuccaggugcuggaccugagcgagaacuuccuguacaagugcaucaccaagaccaaggcguuccaggggcucacgcagcugcgcaagcugaaccucuccuucaacuaccagaagcgggugagcuucgcccaccugucccuggccccgagcuucggcucccucgucgcccugaaggagcuggacaugcacgggaucuucuuccgcagccucgacgagaccacccugcggccccuggcccgccuccccaugcugcagacccugcggcuccagaugaacuucaucaaccaggcgcagcugggcaucuuccgcgccuuccccggccugcgguacguggaccucuccgacaaccgcaucagcggggccuccgagcugacggccaccaugggcgaggccgacgggggcgagaagguguggcugcagccgggggaccucgcgcccgcccccgucgacaccccgagcuccgaggacuuccgccccaacugcagcacccugaacuucacgcuggaccucagccggaacaaccuggugaccgugcagcccgagauguucgcccagcugucccaccuccagugccugcgccugagccacaacugcaucucccaggccgucaacggcagccaguuccucccccugaccggccuccaggugcuggaccugucccacaacaagcuggaccucuaccacgagcacagcuucaccgagcugccgcggcuggaggcgcucgaccuguccuacaacagccagcccuucgggaugcagggcguggggcacaacuucuccuucgucgcccaccuccgcacgcugcggcaccugagccuggcccacaacaacauccacucccaggugagccagcagcucugcuccaccagccugcgcgcccuggacuucuccggcaacgcccucgggcacaugugggcggagggcgaccuguaccugcacuucuuccagggccucagcgggcugaucuggcuggaccucucccagaaccggcugcacacccugcucccccagacccugcgcaaccugcccaagagccuccagguccugcggcugcgcgacaacuaccucgccuucuucaagugguggagccugcacuuccugccgaagcucgaggugcuggaccuggccggcaaccagcucaaggcccugacgaacgggucccugcccgccggcacccggcuccgccggcuggacgugagcugcaacuccaucagcuucgucgcgcccggguucuucuccaaggccaaggagcugcgcgagcucaaccugagcgccaacgcccugaagaccguggaccacuccugguucggcccccucgccagcgcgcugcagauccuggacguguccgccaacccgcuccacugcgccugcggcgccgcguucauggacuuccugcuggagguccaggccgccgugcccgggcugcccagccgggugaagugcggcucccccgggcagcuccagggccugagcaucuucgcccaggaccugcgccucugccuggacgaggcccuguccugggacugcuucgcgcucagccugcuggccgucgcccucggccugggggugccgaugcugcaccaccucugcggcugggaccugugguacugcuuccaccugugccucgccuggcugcccuggcgggggcgccaguccggccgggacgaggacgcccugcccuacgacgcguucguggucuucgacaagacccagagcgccguggccgacuggguguacaacgagcuccgcgggcagcuggaggagugccgcggccggugggcccugcgccucugccuggaggagcgggacuggcugcccggcaagacgcuguucgagaaccugugggccuccgucuacgggagccgcaagacccuguucgugcucgcgcacaccgaccggguguccggccugcugcgcgccagcuuccuccuggcccagcagcggcugcucgaggaccgcaaggacgucguggugcuggucauccugagcccggacgggcggcgcucccgguacgugcgccuccggcagcgccugugccggcagagcgugcugcucuggccccaccagcccuccggccagcgcagcuucugggcccagcuggggauggcgcugacccgggacaaccaccacuucuacaaccgcaacuucugccagggccccacggccgaguga

SEQ ID NO: 9819 - RNA, 3099 nt, Artificial Sequence
  derived and/or modified sequence opt2 from TLR9__Homo_sapiens__AAZ95519
augggcuucugccgcuccgcccuccacccccucucccuccucguccaggccaucaugcucgccaugacccucgcccucggcacccuccccgccuuccuccccugcgagcuccagccccacggccucgucaacugcaacuggcucuuccucaaguccgucccccacuucuccauggccgccccccgcggcaacgucaccucccucucccucuccuccaaccgcauccaccaccuccacgacuccgacuucgcccaccuccccucccuccgccaccucaaccucaaguggaacugcccccccgucggccucucccccaugcacuuccccugccacaugaccaucgagcccuccaccuuccucgccguccccacccucgaggagcucaaccucuccuacaacaacaucaugaccguccccgcccuccccaagucccucaucucccucucccucucccacaccaacauccucaugcucgacuccgccucccucgccggccuccacgcccuccgcuuccucuucauggacggcaacugcuacuacaagaaccccugccgccaggcccucgaggucgcccccggcgcccuccucggccucggcaaccucacccaccucucccucaaguacaacaaccucaccgucgucccccgcaaccuccccuccucccucgaguaccuccuccucuccuacaaccgcaucgucaagcucgcccccgaggaccucgccaaccucaccgcccuccgcguccucgacgucggcggcaacugccgccgcugcgaccacgcccccaaccccugcauggagugcccccgccacuucccccagcuccaccccgacaccuucucccaccucucccgccucgagggccucguccucaaggacuccucccucuccuggcucaacgccuccugguuccgcggccucggcaaccuccagguccucgaccucuccgagaacuuccucuacaagugcaucaccaagaccaaggccuuccagggccucacccagcuccgcaagcucaaccucuccuucaacuaccagaagcgcgucuccuucgcccaccucucccucgcccccuccuucggcucccucgucgcccucaaggagcucgacaugcacggcaucuucuuccgcucccucgacgagaccacccuccgcccccucgcccgccuccccaugcuccagacccuccgccuccagaugaacuucaucaaccaggcccagcucggcaucuuccgcgccuuccccggccuccgcuacgucgaccucuccgacaaccgcaucuccggcgccuccgagcucaccgccaccaugggcgaggccgacggcggcgagaaggucuggcuccagcccggcgaccucgcccccgcccccgucgacacccccuccuccgaggacuuccgccccaacugcuccacccucaacuucacccucgaccucucccgcaacaaccucgucaccguccagcccgagauguucgcccagcucucccaccuccagugccuccgccucucccacaacugcaucucccaggccgucaacggcucccaguuccucccccucaccggccuccagguccucgaccucucccacaacaagcucgaccucuaccacgagcacuccuucaccgagcucccccgccucgaggcccucgaccucuccuacaacucccagcccuucggcaugcagggcgucggccacaacuucuccuucgucgcccaccuccgcacccuccgccaccucucccucgcccacaacaacauccacucccaggucucccagcagcucugcuccaccucccuccgcgcccucgacuucuccggcaacgcccucggccacaugugggccgagggcgaccucuaccuccacuucuuccagggccucuccggccucaucuggcucgaccucucccagaaccgccuccacacccuccucccccagacccuccgcaaccuccccaagucccuccagguccuccgccuccgcgacaacuaccucgccuucuucaagugguggucccuccacuuccuccccaagcucgagguccucgaccucgccggcaaccagcucaaggcccucaccaacggcucccuccccgccggcacccgccuccgccgccucgacgucuccugcaacuccaucuccuucgucgcccccggcuucuucuccaaggccaaggagcuccgcgagcucaaccucuccgccaacgcccucaagaccgucgaccacuccugguucggcccccucgccuccgcccuccagauccucgacgucuccgccaacccccuccacugcgccugcggcgccgccuucauggacuuccuccucgagguccaggccgccguccccggccuccccucccgcgucaagugcggcucccccggccagcuccagggccucuccaucuucgcccaggaccuccgccucugccucgacgaggcccucuccugggacugcuucgcccucucccuccucgccgucgcccucggccucggcguccccaugcuccaccaccucugcggcugggaccucugguacugcuuccaccucugccucgccuggcuccccuggcgcggccgccaguccggccgcgacgaggacgcccuccccuacgacgccuucgucgucuucgacaagacccaguccgccgucgccgacugggucuacaacgagcuccgcggccagcucgaggagugccgcggccgcugggcccuccgccucugccucgaggagcgcgacuggcuccccggcaagacccucuucgagaaccucugggccuccgucuacggcucccgcaagacccucuucguccucgcccacaccgaccgcgucuccggccuccuccgcgccuccuuccuccucgcccagcagcgccuccucgaggaccgcaaggacgucgucguccucgucauccucucccccgacggccgccgcucccgcuacguccgccuccgccagcgccucugccgccaguccguccuccucuggccccaccagcccuccggccagcgcuccuucugggcccagcucggcauggcccucacccgcgacaaccaccacuucuacaaccgcaacuucugccagggccccaccgccgaguga

SEQ ID NO: 9820 - RNA, 3099 nt, Artificial Sequence
  derived and/or modified sequence opt3 from TLR9__Homo_sapiens__AAZ95519
augggcuucugcagaagcgcccugcacccccucucccuucuggugcaggcuaucauguuggcaaugaccuuagcccuggggacacuaccugcguuucucccaugugagcugcaaccgcauggacuugucaacugcaauuggcuguucuugaagucuguuccccacuuuucaauggcugccccuagggguaacgugacuagccucagccuguccucuaaucggauucaucaccuucaugacucggauuucgcacaccucccaucauuacgccaccugaaccuuaaauggaauugucccccuguaggcuugagcccaaugcauuuucccugccacaugacgauagaaccuaguaccuuccuggccgugccaacacuagaggaacucaaccuguccuacaauaacaucaugacugucccggcucugcccaagucucugauuagcuugucccucucacauaccaauauccugauguuagacagugcaagccuggccgggcuccacgcucugcgauuucuguucauggauggaaacuguuauuacaaaaauccuugccgucaggccuuggagguggcgccaggcgcacuacugggucucgggaaccugacacaccuuucucugaaguauaauaacuugaccguugugcccagaaaucucccuuccucacuggaauacuuacugcuaagcuauaacaggauugucaaacucgccccagaggaccuggcuaaccuuacugccuugcgggugcuggauguaggaggcaauugucgcagaugcgaccaugcacccaacccguguauggagugcccuaggcacuuuccccagcuccauccagauacauucagucaccugucucggcuugaaggccugguuuugaaggacuccagccucucguggcugaaugcuucuugguuucgcggguuaggaaaccuucaggugcuagaucucuccgagaauuuccuguacaaguguaucaccaaaacgaaggccuuucaaggucuuacucaguugcgaaaacugaaccucucauucaauuaucagaagagagucaguuucgcgcaucugagcuuagccccuuccuuuggcucucugguggcacuuaaagaauuggacaugcacgggauauucuuuaggagccucgaugagaccacacugcggccccuagcucgucugccaaugcuccagacucugcgccuucaaaugaacuucaucaaucaggcccaguugggaauuuuuagagcuuuccccggccugagguacguggacuuaucagauaaccggaucaguggugccuccgagcucaccgcaacaaugggggaagccgacggaggcgagaaggucuggcugcagccuggcgaccuugcuccagcgccgguugauacccccagcucugaagacuuucgaccuaauugcucaacgcugaacuucacuuuggaucucagucgcaauaaccuggugacaguacaaccagagauguuugcacagcuaagccaucugcagugccucagacugucccacaauuguauuucucaagccgugaacgggucgcaguuccuucccuugaccggacugcaggucuuagaccucagccacaacaagcuggaucuuuaccaugaacacuccuuuacugagcugccuaggcuagaggcucucgaccugucauauaauagucagccauucgguaugcaaggcguggggcacaacuuuucuuucguugcccauuugcggacacugcgccacuuaagccucgcacauaauaacauccacucccaggugucacagcagcugugcagcaccucucuuagagcccuggauuucuccggaaaugcuuugggccauaugugggccgaaggugaccucuaccugcacuuuuuccaagggcuaaguggccugauauggcuugaucucagccagaacaggcugcacacguugcugccccagaccuuacguaaucucccgaaaucucugcagguccuucggcugcgagacaacuauuuggcauuuuucaagugguggucccuccauuuucugccuaaacuagaggugcuggaucuugcgggaaaucaacucaaggcucugacaaacggcucauugccagccgggacuagauuaaggcgccuggacguaaguuguaauagcauuucguucguugcacccggauuuuucuccaaagccaaggaacuccgggagcugaaccuuucugcuaaugcccugaaaaccguggaccacagcugguuugguccuuuggcaucagcucuacagauccuggaugucagugccaacccccuccauugcgcguguggcgccgcuuucauggacuuucugcuugaagugcaggcagccgucccaggguuaccuuccagagugaagugcggaucucccggccagcugcaaggucucagcauuuucgcucaggauuugaggcugugucucgacgaggcccuguccugggauugcuuugcacuuucacuguuggcgguugcccuagggcugggcgugccaaugcuccaccauuuauguggaugggaccugugguacugcuuccaccuuugucuggcuuggcucccguggcgcggccgacagagcgggcgggaugaggacgccuugccuuaugaugcauucguagucuuugacaagacacaaagugcuguggccgauuggguuuacaaugaacugcguggacagcucgaggaaugcagagguaggugggcacugcgccuuugccuagaggaacgggacuggcugcccggcaaaacuuuguucgagaacuuaugggccucuguguauggguccagaaagacccuguuuguccucgcucacacagauagggugagcggacugcuucgagcgucguuccugcucgcccagcagcgcuugcuggaggaccggaaagacguagugguucuagucauccugucaccagauggcagaaggucucguuacgugcgccuccggcaaagacuuuguaggcagagugugcuguuauggccccaucagccuuccggucagcgaaguuuuugggcacaauuggggauggcucugacccgggacaaccaccauuucuacaaucgcaacuuuugccagggcccaacugccgaauga

SEQ ID NO: 9821 - RNA, 3099 nt, Artificial Sequence
  derived and/or modified sequence opt4 from TLR9__Homo_sapiens__AAZ95519
augggcuucugcagaagcgcccugcacccccugagccugcuggugcaggccaucaugcuggccaugacccuggcccugggcacccugcccgccuuccugcccugcgagcugcagccccacggccuggugaacugcaacuggcuguuccugaagagcgugccccacuucagcauggccgcccccagaggcaacgugaccagccugagccugagcagcaacagaauccaccaccugcacgacagcgacuucgcccaccugcccagccugagacaccugaaccugaaguggaacugcccccccgugggccugagccccaugcacuuccccugccacaugaccaucgagcccagcaccuuccuggccgugcccacccuggaggagcugaaccugagcuacaacaacaucaugaccgugcccgcccugcccaagagccugaucagccugagccugagccacaccaacauccugaugcuggacagcgccagccuggccggccugcacgcccugagauuccuguucauggacggcaacugcuacuacaagaaccccugcagacaggcccuggagguggcccccggcgcccugcugggccugggcaaccugacccaccugagccugaaguacaacaaccugaccguggugcccagaaaccugcccagcagccuggaguaccugcugcugagcuacaacagaaucgugaagcuggcccccgaggaccuggccaaccugaccgcccugagagugcuggacgugggcggcaacugcagaagaugcgaccacgcccccaaccccugcauggagugccccagacacuucccccagcugcaccccgacaccuucagccaccugagcagacuggagggccuggugcugaaggacagcagccugagcuggcugaacgccagcugguucagaggccugggcaaccugcaggugcuggaccugagcgagaacuuccuguacaagugcaucaccaagaccaaggccuuccagggccugacccagcugagaaagcugaaccugagcuucaacuaccagaagagagugagcuucgcccaccugagccuggcccccagcuucggcagccugguggcccugaaggagcuggacaugcacggcaucuucuucagaagccuggacgagaccacccugagaccccuggccagacugcccaugcugcagacccugagacugcagaugaacuucaucaaccaggcccagcugggcaucuucagagccuuccccggccugagauacguggaccugagcgacaacagaaucagcggcgccagcgagcugaccgccaccaugggcgaggccgacggcggcgagaagguguggcugcagcccggcgaccuggcccccgcccccguggacacccccagcagcgaggacuucagacccaacugcagcacccugaacuucacccuggaccugagcagaaacaaccuggugaccgugcagcccgagauguucgcccagcugagccaccugcagugccugagacugagccacaacugcaucagccaggccgugaacggcagccaguuccugccccugaccggccugcaggugcuggaccugagccacaacaagcuggaccuguaccacgagcacagcuucaccgagcugcccagacuggaggcccuggaccugagcuacaacagccagcccuucggcaugcagggcgugggccacaacuucagcuucguggcccaccugagaacccugagacaccugagccuggcccacaacaacauccacagccaggugagccagcagcugugcagcaccagccugagagcccuggacuucagcggcaacgcccugggccacaugugggccgagggcgaccuguaccugcacuucuuccagggccugagcggccugaucuggcuggaccugagccagaacagacugcacacccugcugccccagacccugagaaaccugcccaagagccugcaggugcugagacugagagacaacuaccuggccuucuucaagugguggagccugcacuuccugcccaagcuggaggugcuggaccuggccggcaaccagcugaaggcccugaccaacggcagccugcccgccggcaccagacugagaagacuggacgugagcugcaacagcaucagcuucguggcccccggcuucuucagcaaggccaaggagcugagagagcugaaccugagcgccaacgcccugaagaccguggaccacagcugguucggcccccuggccagcgcccugcagauccuggacgugagcgccaacccccugcacugcgccugcggcgccgccuucauggacuuccugcuggaggugcaggccgccgugcccggccugcccagcagagugaagugcggcagccccggccagcugcagggccugagcaucuucgcccaggaccugagacugugccuggacgaggcccugagcugggacugcuucgcccugagccugcuggccguggcccugggccugggcgugcccaugcugcaccaccugugcggcugggaccugugguacugcuuccaccugugccuggccuggcugcccuggagaggcagacagagcggcagagacgaggacgcccugcccuacgacgccuucgugguguucgacaagacccagagcgccguggccgacuggguguacaacgagcugagaggccagcuggaggagugcagaggcagaugggcccugagacugugccuggaggagagagacuggcugcccggcaagacccuguucgagaaccugugggccagcguguacggcagcagaaagacccuguucgugcuggcccacaccgacagagugagcggccugcugagagccagcuuccugcuggcccagcagagacugcuggaggacagaaaggacgugguggugcuggugauccugagccccgacggcagaagaagcagauacgugagacugagacagagacugugcagacagagcgugcugcuguggccccaccagcccagcggccagagaagcuucugggcccagcugggcauggcccugaccagagacaaccaccacuucuacaacagaaacuucugccagggccccaccgccgaguga

SEQ ID NO: 9822 - RNA, 3099 nt, Artificial Sequence
  derived and/or modified sequence opt5 from TLR9__Homo_sapiens__AAZ95519
augggcuucugcagaagcgcccugcacccccucucccugcuugugcaggcuaucaugcuggccaugacccucgcgcuggggacacuuccugcuuuucugccgugugagcuccaaccccauggacuggucaacugcaauuggcuguuccucaagucuguuccucacuuuagcauggccgcuccccggggcaacgugacgucccugucucuuagcuccaaucgcauucaucaucugcacgacucugauuucgcucaccucccuagccugagacaccuuaaccugaaauggaauugucccccuguggggcucuccccgaugcauuuucccugccacaugaccaucgaaccuagcacauuccuggccguccccacccuggaggaacucaaccugucuuacaauaacauuaugacagugccugcucugcccaagucccugaucagccucucucugucccauaccaauauucuuaugcuggacagcgccucucucgcgggacugcacgcccugcgguuucucuucauggauggcaacuguuauuacaaaaauccgugccgccaggcucuggagguugccccuggggcccuucugggacucggcaaccugacacaccuuucccugaaguauaauaaccucaccgugguccccagaaaucugccuagcucccuggaauaccuccugcuuucuuauaaccggaucgugaaacuggcccccgaggaccucgcgaaccugacggcccugcgcguucuugaugugggcgggaauuguagacggugcgaccaugcucccaacccuuguauggagugcccgcgccacuuuccccagcuccauccugauaccuucagccaccuguccagacuggaaggacucguccugaaggacagcucucuuuccuggcugaaugccagcugguuucggggccucgggaaccuucaggugcuggaucuuucugagaauuuccucuacaaguguaucacaaaaaccaaggcuuuucaaggacugacacagcugcgcaaacucaaccugagcuucaauuaucagaagagaguguccuucgcccaucuuucucuggcccccagcuuuggcucccucgucgcucugaaagaacuggacaugcacgggauuuucuuucggagccuugaugagaccacgcuccgcccucuggcgagacugcccaugcuccagacacugcggcuucaaaugaacuucaucaaucaggcccagcugggaauuuuuagagcuuucccgggccuccgcuacguugaccugucugauaaccggaucuccggcgccagcgagcugaccgccacaaugggggaagcugacggaggcgagaagguguggcuucagccuggggaccucgcccccgcgccuguggauacccccucuuccgaagacuuuagaccuaauugcagcacccugaacuucacacuggaucucucccgcaauaaccuggucacggugcaacccgagauguuugcucagcuuucucaucugcagugccuccggcugagccacaauuguauuucccaagccguuaacggaucucaguuccugccgcuuaccggccuccaggugcuggaccugagccacaacaagcucgaucuguaccaugaacacuccuuuacagagcuuccuagacuggaggcccucgaccugagcuauaauucucagcccuucgggaugcaaggagucggccacaacuuuuccuucguggcucaucugcgcacccuucggcaccugagccucgcccauaauaacauccacucucagguuucccagcagcugugcagcacaucucucagagcucuggauuucagcggcaaugcccuugggcauaugugggcggaaggagaccuguaccuccacuuuuuccaaggccuguccgggcugauuuggcuugaucugagccagaaccgccuccacacccugcucccccagacgcugcggaaucuuccuaaaucucuccaggugcugagacugcgcgacaacuaucuggccuuuuucaagugguggucccuucauuuucugccgaaacucgagguccuggaucucgcuggaaaucaacugaaggcccuuacaaacggcagccugcccgcugggacccggcugagacggcucgacguguccuguaauucuaucagcuucgucgccccuggcuuuuucuccaaagcgaaggaacugcgcgagcuuaaccugucugccaaugcucucaaaaccguggaccacagcugguuuggaccccuggccuccgcucuccagauccuggauguuucugccaacccucuucauugcgccuguggcgcugcguucauggacuuucugcuggaagugcaggccgcuguccccgggcucccuagcagagugaagugcggaucccccggccagcugcaagggcuuagcauuuucgcccaggaucugcggcucugucuggacgaggcccucucuugggauugcuuugcucugucccuucuggccguugcgcugggacucggcgugccgaugcugcaccaucuuugugggugggaccugugguacugcuuccaccucugucuggcuuggcugccuuggagaggccgccagagcggacgggaugaggacgcccuccccuaugaugccuucgucguguuugacaagacacaaucugcuguggccgauuggguuuacaaugaacuuagaggccagcuggaggaaugccgcgggagaugggcgcugcggcucugccuggaggaacgcgacuggcuuccuggaaaaacccuguucgagaaccucugggcuuccgucuauggcagcagaaagacacuguuugugcuggcccacacggaucgggugucugggcuccuucgcgccuccuuccugcuggcucagcagagacuccuggaggaccggaaagacgucgugguucuugugauccugagccccgauggacgcagaucccgguacguccgccucagacaacggcuguguagacagagcgugcugcucuggccgcaucagccuucuggccagcgcagcuuuugggcccaacuugggauggcucugacccgggacaaccaccauuucuacaauagaaacuuuugccagggccccacagccgaauga

SEQ ID NO: 9823 - protein, 78 aa, Artificial Sequence
  TLR9__Homo_sapiens__L0R5D6
MRPCRTLEMVPTRAEKDKSAAAVLRAPAVVQEPRPEGGSVLLEWGVPSKVYPLLVLSRIPISPCSLPELWALAPPWAW

SEQ ID NO: 9824 - RNA, 237 nt, Artificial Sequence
  TLR9__Homo_sapiens__CCO13834
augaggcccugcagaacucuggagauggugccuacaagggcagaaaaggacaagucggcagccgcuguccugagggcaccagcuguggugcaggagccaagaccugaggguggaaguguccucuuagaauggggagugcccagcaagguguacccgcuacuggugcuauccagaauucccaucucucccugcucucugccugagcucugggccuuagcuccucccugggcuugguag

SEQ ID NO: 9825 - RNA, 237 nt, Artificial Sequence
  derived and/or modified sequence opt1 from TLR9__Homo_sapiens__CCO13834
augcgccccugccggacccuggagauggugcccacccgcgccgagaaggacaagagcgccgcggccguccuccgggcccccgccguggugcaggagccccgccccgagggcggguccguccugcuggaguggggcgugccgagcaagguguacccccuccugguccugucccggauccccaucagccccugcucccucccggagcugugggcccuggcgccgcccugggccugguga

SEQ ID NO: 9826 - RNA, 237 nt, Artificial Sequence
  derived and/or modified sequence opt2 from TLR9__Homo_sapiens__CCO13834
augcgccccugccgcacccucgagaugguccccacccgcgccgagaaggacaaguccgccgccgccguccuccgcgcccccgccgucguccaggagccccgccccgagggcggcuccguccuccucgaguggggcguccccuccaaggucuacccccuccucguccucucccgcauccccaucucccccugcucccuccccgagcucugggcccucgccccccccugggccugguga

SEQ ID NO: 9827 - RNA, 237 nt, Artificial Sequence
  derived and/or modified sequence opt3 from TLR9__Homo_sapiens__CCO13834
augagacccugcaggacccuggagauggugccuacacgggccgaaaaggacaaaagcgcugcagccguccuccgcgcgccagcuguugugcaggagccgcgacccgaaggcggguccguacuucuggaguggggagugccuucuaaggucuacccauuguuagugcugucacguauccccauuaguccuuguagccuaccagaacucugggcccuggcacccccuugggccugguga

SEQ ID NO: 9828 - RNA, 237 nt, Artificial Sequence
  derived and/or modified sequence opt4 from TLR9__Homo_sapiens__CCO13834
augagacccugcagaacccuggagauggugcccaccagagccgagaaggacaagagcgccgccgccgugcugagagcccccgccguggugcaggagcccagacccgagggcggcagcgugcugcuggaguggggcgugcccagcaagguguacccccugcuggugcugagcagaauccccaucagccccugcagccugcccgagcugugggcccuggccccccccugggccugguga

SEQ ID NO: 9829 - RNA, 237 nt, Artificial Sequence
  derived and/or modified sequence opt5 from TLR9__Homo_sapiens__CCO13834
augagacccugccggacccuggagauggugccuacacgcgccgaaaaggacaaaagcgcugccgcgguccucagagcuccggccguugugcaggagccccggccugaaggcggguccgugcugcuugaguggggaguccccucuaagguguacccucugcucguucugagccgcauccccauuuccccuuguucucuuccggaacugugggcccucgcucccccuugggccugguga

SEQ ID NO: 9830 - protein, 44 aa, Artificial Sequence
  TLR9__Homo_sapiens__L8E8B9
MEGRRSGCSLGTLLRPQWTLPALKTSGPTAAPSTSPWICHGTTW

SEQ ID NO: 9831 - RNA, 135 nt, Artificial Sequence
  TLR9__Homo_sapiens__CCQ43550
auggaggggagaaggucuggcugcagccuggggaccuugcuccggccccaguggacacucccagcucugaagacuucaggcccaacugcagcacccucaacuucaccuuggaucugucacggaacaaccugguga

SEQ ID NO: 9832 - RNA, 135 nt, Artificial Sequence
  derived and/or modified sequence opt1 from TLR9__Homo_sapiens__CCQ43550
auggagggccgccggagcgggugcucccugggcacccuccugcgcccccaguggacccugccggcccucaagacgagcgggcccaccgccgcgcccuccaccagccccuggaucugccacggcaccacgugguga

SEQ ID NO: 9833 - RNA, 135 nt, Artificial Sequence
  derived and/or modified sequence opt2 from TLR9__Homo_sapiens__CCQ43550
auggagggccgccgcuccggcugcucccucggcacccuccuccgcccccaguggacccuccccgcccucaagaccuccggccccaccgccgcccccuccaccucccccuggaucugccacggcaccaccugguga

SEQ ID NO: 9834 - RNA, 135 nt, Artificial Sequence
  derived and/or modified sequence opt3 from TLR9__Homo_sapiens__CCQ43550
auggagggcagaaggagcgggugcucccugggaacccuccuucggccccaguggacacugccugccuugaagacuucugguccaacggcugcaccgucaaccagucccuggaucugucacggcacaacuugguga

SEQ ID NO: 9835 - RNA, 135 nt, Artificial Sequence
  derived and/or modified sequence opt4 from TLR9__Homo_sapiens__CCQ43550
auggagggcagaagaagcggcugcagccugggcacccugcugagaccccaguggacccugcccgcccugaagaccagcggccccaccgccgcccccagcaccagccccuggaucugccacggcaccaccugguga

SEQ ID NO: 9836 - RNA, 135 nt, Artificial Sequence
  derived and/or modified sequence opt5 from TLR9__Homo_sapiens__CCQ43550
auggagggcagacggagcgggugcucccugggaacccuccugcgcccccaguggacacuuccugcccugaagacgucuggcccgaccgcugcccccagcacauccccuuggaucugucacgggaccacaugguga

SEQ ID NO: 9837 - protein, 1032 aa, Artificial Sequence
  TLR9__Homo_sapiens__Q9NR96
MGFCRSALHPLSLLVQAIMLAMTLALGTLPAFLPCELQPHGLVNCNWLFLKSVPHFSMAAPRGNVTSLSLSSNRIHHLHDSDFAHLPSLRHLNLKWNCPPVGLSPMHFPCHMTIEPSTFLAVPTLEELNLSYNNIMTVPALPKSLISLSLSHTNILMLDSASLAGLHALRFLFMDGNCYYKNPCRQALEVAPGALLGLGNLTHLSLKYNNLTVVPRNLPSSLEYLLLSYNRIVKLAPEDLANLTALRVLDVGGNCRRCDHAPNPCMECPRHFPQLHPDTFSHLSRLEGLVLKDSSLSWLNASWFRGLGNLRVLDLSENFLYKCITKTKAFQGLTQLRKLNLSFNYQKRVSFAHLSLAPSFGSLVALKELDMHGIFFRSLDETTLRPLARLPMLQTLRLQMNFINQAQLGIFRAFPGLRYVDLSDNRISGASELTATMGEADGGEKVWLQPGDLAPAPVDTPSSEDFRPNCSTLNFTLDLSRNNLVTVQPEMFAQLSHLQCLRLSHNCISQAVNGSQFLPLTGLQVLDLSHNKLDLYHEHSFTELPRLEALDLSYNSQPFGMQGVGHNFSFVAHLRTLRHLSLAHNNIHSQVSQQLCSTSLRALDFSGNALGHMWAEGDLYLHFFQGLSGLIWLDLSQNRLHTLLPQTLRNLPKSLQVLRLRDNYLAFFKWWSLHFLPKLEVLDLAGNQLKALTNGSLPAGTRLRRLDVSCNSISFVAPGFFSKAKELRELNLSANALKTVDHSWFGPLASALQILDVSANPLHCACGAAFMDFLLEVQAAVPGLPSRVKCGSPGQLQGLSIFAQDLRLCLDEALSWDCFALSLLAVALGLGVPMLHHLCGWDLWYCFHLCLAWLPWRGRQSGRDEDALPYDAFVVFDKTQSAVADWVYNELRGQLEECRGRWALRLCLEERDWLPGKTLFENLWASVYGSRKTLFVLAHTDRVSGLLRASFLLAQQRLLEDRKDVVVLVILSPDGRRSRYVRLRQRLCRQSVLLWPHQPSGQRSFWAQLGMALTRDNHHFYNRNFCQGPTAE

SEQ ID NO: 9838 - RNA, 3099 nt, Artificial Sequence
  TLR9__Homo_sapiens__AAF72189
auggguuucugccgcagcgcccugcacccgcugucucuccuggugcaggccaucaugcuggccaugacccuggcccuggguaccuugccugccuuccuacccugugagcuccagccccacggccuggugaacugcaacuggcuguuccugaagucugugccccacuucuccauggcagcaccccguggcaaugucaccagccuuuccuuguccuccaaccgcauccaccaccuccaugauucugacuuugcccaccugcccagccugcggcaucucaaccucaaguggaacugcccgccgguuggccucagccccaugcacuuccccugccacaugaccaucgagcccagcaccuucuuggcugugcccacccuggaagagcuaaaccugagcuacaacaacaucaugacugugccugcgcugcccaaaucccucauaucccugucccucagccauaccaacauccugaugcuagacucugccagccucgccggccugcaugcccugcgcuuccuauucauggacggcaacuguuauuacaagaaccccugcaggcaggcacuggagguggccccgggugcccuccuuggccugggcaaccucacccaccugucacucaaguacaacaaccucacuguggugccccgcaaccugccuuccagccuggaguaucugcuguuguccuacaaccgcaucgucaaacuggcgccugaggaccuggccaaucugaccgcccugcgugugcucgaugugggcggaaauugccgccgcugcgaccacgcucccaaccccugcauggagugcccucgucacuucccccagcuacaucccgauaccuucagccaccugagccgucuugaaggccugguguugaaggacaguucucucuccuggcugaaugccaguugguuccgugggcugggaaaccuccgagugcuggaccugagugagaacuuccucuacaaaugcaucacuaaaaccaaggccuuccagggccuaacacagcugcgcaagcuuaaccuguccuucaauuaccaaaagaggguguccuuugcccaccugucucuggccccuuccuucgggagccuggucgcccugaaggagcuggacaugcacggcaucuucuuccgcucacucgaugagaccacgcuccggccacuggcccgccugcccaugcuccagacucugcgucugcagaugaacuucaucaaccaggcccagcucggcaucuucagggccuucccuggccugcgcuacguggaccugucggacaaccgcaucagcggagcuucggagcugacagccaccaugggggaggcagauggaggggagaaggucuggcugcagccuggggaccuugcuccggccccaguggacacucccagcucugaagacuucaggcccaacugcagcacccucaacuucaccuuggaucugucacggaacaaccuggugaccgugcagccggagauguuugcccagcucucgcaccugcagugccugcgccugagccacaacugcaucucgcaggcagucaauggcucccaguuccugccgcugaccggucugcaggugcuagaccugucccacaauaagcuggaccucuaccacgagcacucauucacggagcuaccacgacuggaggcccuggaccucagcuacaacagccagcccuuuggcaugcagggcgugggccacaacuucagcuucguggcucaccugcgcacccugcgccaccucagccuggcccacaacaacauccacagccaagugucccagcagcucugcaguacgucgcugcgggcccuggacuucagcggcaaugcacugggccauaugugggccgagggagaccucuaucugcacuucuuccaaggccugagcgguuugaucuggcuggacuugucccagaaccgccugcacacccuccugccccaaacccugcgcaaccuccccaagagccuacaggugcugcgucuccgugacaauuaccuggccuucuuuaagugguggagccuccacuuccugcccaaacuggaaguccucgaccuggcaggaaaccagcugaaggcccugaccaauggcagccugccugcuggcacccggcuccggaggcuggaugucagcugcaacagcaucagcuucguggcccccggcuucuuuuccaaggccaaggagcugcgagagcucaaccuuagcgccaacgcccucaagacaguggaccacuccugguuugggccccuggcgagugcccugcaaauacuagauguaagcgccaacccucugcacugcgccuguggggcggccuuuauggacuuccugcuggaggugcaggcugccgugcccggucugcccagccgggugaaguguggcaguccgggccagcuccagggccucagcaucuuugcacaggaccugcgccucugccuggaugaggcccucuccugggacuguuucgcccucucgcugcuggcuguggcucugggccugggugugcccaugcugcaucaccucuguggcugggaccucugguacugcuuccaccugugccuggccuggcuucccuggcgggggcggcaaagugggcgagaugaggaugcccugcccuacgaugccuucguggucuucgacaaaacgcagagcgcaguggcagacuggguguacaacgagcuucgggggcagcuggaggagugccgugggcgcugggcacuccgccugugccuggaggaacgcgacuggcugccuggcaaaacccucuuugagaaccugugggccucggucuauggcagccgcaagacgcuguuugugcuggcccacacggaccgggucaguggucucuugcgcgccagcuuccugcuggcccagcagcgccugcuggaggaccgcaaggacgucguggugcuggugauccugagcccugacggccgccgcucccgcuacgugcggcugcgccagcgccucugccgccagaguguccuccucuggccccaccagcccaguggucagcgcagcuucugggcccagcugggcauggcccugaccagggacaaccaccacuucuauaaccggaacuucugccagggacccacggccgaauag

SEQ ID NO: 9839 - RNA, 3099 nt, Artificial Sequence
  derived and/or modified sequence opt1 from TLR9__Homo_sapiens__AAF72189
augggcuucugccgcagcgcccugcacccccucucccugcuggugcaggccaucaugcucgcgaugacccuggcccuggggacccucccggccuuccugcccugcgagcugcagccccacggccucgucaacugcaacuggcuguuccugaaguccgugccccacuucagcauggccgccccgcgggggaacgugacgagccucucccugagcuccaaccgcauccaccaccuccacgacagcgacuucgcgcaccuccccucccugcggcaccugaaccucaaguggaacugcccgcccgucggccugagccccaugcacuuccccugccacaugaccaucgagcccuccaccuuccuggccgugcccacccucgaggagcugaaccugagcuacaacaacaucaugacggugccggcccuccccaagucccugaucagccugucccucagccacaccaacauccugaugcuggacuccgccagccucgcggggcugcacgcccugcgcuuccucuucauggacggcaacugcuacuacaagaaccccugccggcaggcccuggaggucgcccccggcgcccugcucgggcugggcaaccugacccaccucucccugaaguacaacaaccugaccguggugccgcgcaaccuccccagcagccuggaguaccugcuccuguccuacaaccggaucgucaagcuggcgcccgaggaccucgccaaccugacggcccugcgcgugcuggacgucgggggcaacugccggcgcugcgaccacgcccccaacccgugcauggagugcccccggcacuucccccagcuccaccccgacaccuucagccaccugucccgccuggaggggcucgugcugaaggacagcucccugagcuggcucaacgccuccugguuccggggccugggcaaccugcgcgugcucgaccugagcgagaacuuccuguacaagugcaucaccaagaccaaggcguuccaggggcucacgcagcugcggaagcugaaccucuccuucaacuaccagaagcgcgugagcuucgcccaccugucccuggccccgagcuucggcucccucgucgcccugaaggagcuggacaugcacgggaucuucuuccggagccucgacgagaccacccugcgcccccuggcccggcuccccaugcugcagacccugcgccuccagaugaacuucaucaaccaggcgcagcugggcaucuuccgggccuuccccggccugcgcuacguggaccucuccgacaaccgcaucagcggggccuccgagcugacggccaccaugggcgaggccgacgggggcgagaagguguggcugcagccgggggaccucgcgcccgcccccgucgacaccccgagcuccgaggacuuccggcccaacugcagcacccugaacuucacgcuggaccucagccgcaacaaccuggugaccgugcagcccgagauguucgcccagcugucccaccuccagugccugcggcugagccacaacugcaucucccaggccgucaacggcagccaguuccucccccugaccggccuccaggugcuggaccugucccacaacaagcuggaccucuaccacgagcacagcuucaccgagcugccgcgccuggaggcgcucgaccuguccuacaacagccagcccuucgggaugcagggcguggggcacaacuucuccuucgucgcccaccuccggacgcugcgccaccugagccuggcccacaacaacauccacucccaggugagccagcagcucugcuccaccagccugcgggcccuggacuucuccggcaacgcccucgggcacaugugggcggagggcgaccuguaccugcacuucuuccagggccucagcgggcugaucuggcuggaccucucccagaaccgccugcacacccugcucccccagacccugcggaaccugcccaagagccuccagguccugcgccugcgggacaacuaccucgccuucuucaagugguggagccugcacuuccugccgaagcucgaggugcuggaccuggccggcaaccagcucaaggcccugacgaacgggucccugcccgccggcacccgccuccggcgccuggacgugagcugcaacuccaucagcuucgucgcgcccggguucuucuccaaggccaaggagcugcgggagcucaaccugagcgccaacgcccugaagaccguggaccacuccugguucggcccccucgccagcgcgcugcagauccuggacguguccgccaacccgcuccacugcgccugcggcgccgcguucauggacuuccugcuggagguccaggccgccgugcccgggcugcccagccgcgugaagugcggcucccccgggcagcuccagggccugagcaucuucgcccaggaccugcggcucugccuggacgaggcccuguccugggacugcuucgcgcucagccugcuggccgucgcccucggccugggggugccgaugcugcaccaccucugcggcugggaccugugguacugcuuccaccugugccucgccuggcugcccuggcgcgggcggcaguccggccgcgacgaggacgcccugcccuacgacgcguucguggucuucgacaagacccagagcgccguggccgacuggguguacaacgagcuccgcgggcagcuggaggagugccggggccgcugggcccugcggcucugccuggaggagcgcgacuggcugcccggcaagacgcuguucgagaaccugugggccuccgucuacgggagccggaagacccuguucgugcucgcgcacaccgaccgcguguccggccugcugcgggccagcuuccuccuggcccagcagcgccugcucgaggaccggaaggacgucguggugcuggucauccugagcccggacgggcgccggucccgcuacgugcggcuccgccagcggcugugccgccagagcgugcugcucuggccccaccagcccuccggccagcggagcuucugggcccagcuggggauggcgcugacccgcgacaaccaccacuucuacaaccggaacuucugccagggccccacggccgaguga

SEQ ID NO: 9840 - RNA, 3099 nt, Artificial Sequence
  derived and/or modified sequence opt2 from TLR9__Homo_sapiens__AAF72189
augggcuucugccgcuccgcccuccacccccucucccuccucguccaggccaucaugcucgccaugacccucgcccucggcacccuccccgccuuccuccccugcgagcuccagccccacggccucgucaacugcaacuggcucuuccucaaguccgucccccacuucuccauggccgccccccgcggcaacgucaccucccucucccucuccuccaaccgcauccaccaccuccacgacuccgacuucgcccaccuccccucccuccgccaccucaaccucaaguggaacugcccccccgucggccucucccccaugcacuuccccugccacaugaccaucgagcccuccaccuuccucgccguccccacccucgaggagcucaaccucuccuacaacaacaucaugaccguccccgcccuccccaagucccucaucucccucucccucucccacaccaacauccucaugcucgacuccgccucccucgccggccuccacgcccuccgcuuccucuucauggacggcaacugcuacuacaagaaccccugccgccaggcccucgaggucgcccccggcgcccuccucggccucggcaaccucacccaccucucccucaaguacaacaaccucaccgucgucccccgcaaccuccccuccucccucgaguaccuccuccucuccuacaaccgcaucgucaagcucgcccccgaggaccucgccaaccucaccgcccuccgcguccucgacgucggcggcaacugccgccgcugcgaccacgcccccaaccccugcauggagugcccccgccacuucccccagcuccaccccgacaccuucucccaccucucccgccucgagggccucguccucaaggacuccucccucuccuggcucaacgccuccugguuccgcggccucggcaaccuccgcguccucgaccucuccgagaacuuccucuacaagugcaucaccaagaccaaggccuuccagggccucacccagcuccgcaagcucaaccucuccuucaacuaccagaagcgcgucuccuucgcccaccucucccucgcccccuccuucggcucccucgucgcccucaaggagcucgacaugcacggcaucuucuuccgcucccucgacgagaccacccuccgcccccucgcccgccuccccaugcuccagacccuccgccuccagaugaacuucaucaaccaggcccagcucggcaucuuccgcgccuuccccggccuccgcuacgucgaccucuccgacaaccgcaucuccggcgccuccgagcucaccgccaccaugggcgaggccgacggcggcgagaaggucuggcuccagcccggcgaccucgcccccgcccccgucgacacccccuccuccgaggacuuccgccccaacugcuccacccucaacuucacccucgaccucucccgcaacaaccucgucaccguccagcccgagauguucgcccagcucucccaccuccagugccuccgccucucccacaacugcaucucccaggccgucaacggcucccaguuccucccccucaccggccuccagguccucgaccucucccacaacaagcucgaccucuaccacgagcacuccuucaccgagcucccccgccucgaggcccucgaccucuccuacaacucccagcccuucggcaugcagggcgucggccacaacuucuccuucgucgcccaccuccgcacccuccgccaccucucccucgcccacaacaacauccacucccaggucucccagcagcucugcuccaccucccuccgcgcccucgacuucuccggcaacgcccucggccacaugugggccgagggcgaccucuaccuccacuucuuccagggccucuccggccucaucuggcucgaccucucccagaaccgccuccacacccuccucccccagacccuccgcaaccuccccaagucccuccagguccuccgccuccgcgacaacuaccucgccuucuucaagugguggucccuccacuuccuccccaagcucgagguccucgaccucgccggcaaccagcucaaggcccucaccaacggcucccuccccgccggcacccgccuccgccgccucgacgucuccugcaacuccaucuccuucgucgcccccggcuucuucuccaaggccaaggagcuccgcgagcucaaccucuccgccaacgcccucaagaccgucgaccacuccugguucggcccccucgccuccgcccuccagauccucgacgucuccgccaacccccuccacugcgccugcggcgccgccuucauggacuuccuccucgagguccaggccgccguccccggccuccccucccgcgucaagugcggcucccccggccagcuccagggccucuccaucuucgcccaggaccuccgccucugccucgacgaggcccucuccugggacugcuucgcccucucccuccucgccgucgcccucggccucggcguccccaugcuccaccaccucugcggcugggaccucugguacugcuuccaccucugccucgccuggcuccccuggcgcggccgccaguccggccgcgacgaggacgcccuccccuacgacgccuucgucgucuucgacaagacccaguccgccgucgccgacugggucuacaacgagcuccgcggccagcucgaggagugccgcggccgcugggcccuccgccucugccucgaggagcgcgacuggcuccccggcaagacccucuucgagaaccucugggccuccgucuacggcucccgcaagacccucuucguccucgcccacaccgaccgcgucuccggccuccuccgcgccuccuuccuccucgcccagcagcgccuccucgaggaccgcaaggacgucgucguccucgucauccucucccccgacggccgccgcucccgcuacguccgccuccgccagcgccucugccgccaguccguccuccucuggccccaccagcccuccggccagcgcuccuucugggcccagcucggcauggcccucacccgcgacaaccaccacuucuacaaccgcaacuucugccagggccccaccgccgaguga

SEQ ID NO: 9841 - RNA, 3099 nt, Artificial Sequence
  derived and/or modified sequence opt3 from TLR9__Homo_sapiens__AAF72189
augggcuucugcagaagcgcccugcacccccucucccuucuggugcaggcuaucauguuggcaaugaccuuagcccuggggacacuaccugcguuucucccaugugagcugcaaccgcauggacuugucaacugcaauuggcuguucuugaagucuguuccccacuuuucaauggcugccccuagggguaacgugacgagucucagccuguccucuaaucggauucaucaccuucaugacucggauuucgcacaccucccaucauuacgccaccugaaccuuaaauggaauugucccccuguaggcuugagcccaaugcauuuucccugccacaugacuauagaaccuaguaccuuccuggccgugccaacacuagaggaacucaaccuguccuacaauaacaucaugacugucccggcucugcccaagucucugauuagcuugucccucucacauaccaauauccugauguuagacagugcaagccuggccgggcuccacgcucugcgauuucuguucauggauggaaacuguuauuacaaaaauccuugccgucaggccuuggagguggcgccaggcgcacuacugggucucgggaaccugacacaccuuucucugaaguauaauaacuugaccguugugcccagaaaucucccuuccucacuggaauacuuacugcuaagcuauaacaggauugucaaacucgccccagaggaccuggcuaaccuuacugccuugcgggugcuggauguaggaggcaauugucgcagaugcgaccaugcacccaacccguguauggagugcccuaggcacuuuccccagcuccauccagauacauucagucaccugucucggcuugaaggccugguuuugaaggacuccagccucucguggcugaaugcuucuugguuucgcggguuaggaaaccugcgagugcuagaucucuccgagaauuuccuguacaaguguaucaccaaaacgaaggccuuucagggucuuacucaauugagaaaacugaaccucucauucaauuaucagaagagggucaguuucgcgcaucugagcuuagccccuuccuuuggcucucugguggcacuuaaagaauuggacaugcacgggauauucuuucggagccucgaugagaccacacugcguccccuagcucgccugccaaugcuccagacucugagacuucagaugaacuucaucaaucaagcccaguugggaauuuuuagggcuuuccccggccugcgguacguggacuuaucagauaaccgaaucaguggugccuccgagcucaccgcaacaaugggggaagccgacggaggcgagaaggucuggcugcagccuggcgaccuugcuccagcgccgguugauacccccagcucugaagacuuucgcccuaauugcucaacgcugaacuucacuuuggaucucaguagaaauaaccuggugacaguacagccagagauguuugcacaacuaagccaccuucagugccucaggcugucccauaauuguauuucucaggccgugaacgggucgcaauuccuucccuugaccggacugcaggucuuagaccucagccacaacaagcuggaucuuuaccaugaacacuccuuuacugagcugccucggcuagaggcucucgaccugucauauaauagucagccauucgguaugcagggcguggggcacaacuuuucuuucguugcccauuugcgcacacugagacacuuaagccucgcacauaauaacauccacucccaagugucacagcagcugugcagcaccucucuuagggcccuggauuucuccggaaaugcuuugggccauaugugggccgaaggugaccucuaccugcacuuuuuccaggggcuaaguggccugauauggcuugaucucagccaaaaccgucugcacacguugcugccccagaccuuacggaaucucccgaaaucucugcagguccuucgacugagagacaacuauuuggcauuuuucaagugguggucccuccauuuucugccuaaacuagaggugcuggaucuugcgggaaaucagcucaaggcucugacaaacggcucauugccagccgggacuagguuacgccggcuggacguaaguuguaauagcauuucguucguugcacccggauuuuucuccaaagccaaggaacucagagagcugaaccuuucugcuaaugcccugaaaaccguggaccacagcugguuugguccuuuggcaucagcucuacaaauccuggaugucagugccaacccccuccauugcgcguguggcgccgcuuucauggacuuucugcuugaagugcaggcagccgucccaggguuaccuuccagggugaagugcggaucucccggccagcugcagggucucagcauuuucgcucaagauuugcgccugugucucgacgaggcccuguccugggauugcuuugcacuuucacuguuggcgguugcccuagggcugggcgugccaaugcuccaccauuuauguggaugggaccugugguacugcuuccaccuuugucuggcuuggcucccguggcgaggccggcagagcgggcgugaugaggacgccuugccuuaugaugcauucguagucuuugacaagacacagagugcuguggccgauuggguuuacaaugaacugagaggacaacucgaggaaugcaggggucgcugggcacugcggcuuugccuagaggaaagagacuggcugcccggcaaaacuuuguucgagaacuuaugggccucuguguauggguccaggaagacccuguuuguccucgcucacacagaucgagugagcggacugcuucgcgcgucguuccugcucgcccagcagcgguugcuggaggacagaaaagacguagugguucuagucauccugucaccagauggcaggcguucucgcuacgugcggcucagacagaggcuuugucgacaaagugugcuguuauggccccaucagccuuccggucagcggagcuuuugggcacaguuggggauggcucugacccgcgacaaccaccauuucuacaauagaaacuuuugccaaggcccaacugccgaauga

SEQ ID NO: 9842 - RNA, 3099 nt, Artificial Sequence
  derived and/or modified sequence opt4 from TLR9__Homo_sapiens__AAF72189
augggcuucugcagaagcgcccugcacccccugagccugcuggugcaggccaucaugcuggccaugacccuggcccugggcacccugcccgccuuccugcccugcgagcugcagccccacggccuggugaacugcaacuggcuguuccugaagagcgugccccacuucagcauggccgcccccagaggcaacgugaccagccugagccugagcagcaacagaauccaccaccugcacgacagcgacuucgcccaccugcccagccugagacaccugaaccugaaguggaacugcccccccgugggccugagccccaugcacuuccccugccacaugaccaucgagcccagcaccuuccuggccgugcccacccuggaggagcugaaccugagcuacaacaacaucaugaccgugcccgcccugcccaagagccugaucagccugagccugagccacaccaacauccugaugcuggacagcgccagccuggccggccugcacgcccugagauuccuguucauggacggcaacugcuacuacaagaaccccugcagacaggcccuggagguggcccccggcgcccugcugggccugggcaaccugacccaccugagccugaaguacaacaaccugaccguggugcccagaaaccugcccagcagccuggaguaccugcugcugagcuacaacagaaucgugaagcuggcccccgaggaccuggccaaccugaccgcccugagagugcuggacgugggcggcaacugcagaagaugcgaccacgcccccaaccccugcauggagugccccagacacuucccccagcugcaccccgacaccuucagccaccugagcagacuggagggccuggugcugaaggacagcagccugagcuggcugaacgccagcugguucagaggccugggcaaccugagagugcuggaccugagcgagaacuuccuguacaagugcaucaccaagaccaaggccuuccagggccugacccagcugagaaagcugaaccugagcuucaacuaccagaagagagugagcuucgcccaccugagccuggcccccagcuucggcagccugguggcccugaaggagcuggacaugcacggcaucuucuucagaagccuggacgagaccacccugagaccccuggccagacugcccaugcugcagacccugagacugcagaugaacuucaucaaccaggcccagcugggcaucuucagagccuuccccggccugagauacguggaccugagcgacaacagaaucagcggcgccagcgagcugaccgccaccaugggcgaggccgacggcggcgagaagguguggcugcagcccggcgaccuggcccccgcccccguggacacccccagcagcgaggacuucagacccaacugcagcacccugaacuucacccuggaccugagcagaaacaaccuggugaccgugcagcccgagauguucgcccagcugagccaccugcagugccugagacugagccacaacugcaucagccaggccgugaacggcagccaguuccugccccugaccggccugcaggugcuggaccugagccacaacaagcuggaccuguaccacgagcacagcuucaccgagcugcccagacuggaggcccuggaccugagcuacaacagccagcccuucggcaugcagggcgugggccacaacuucagcuucguggcccaccugagaacccugagacaccugagccuggcccacaacaacauccacagccaggugagccagcagcugugcagcaccagccugagagcccuggacuucagcggcaacgcccugggccacaugugggccgagggcgaccuguaccugcacuucuuccagggccugagcggccugaucuggcuggaccugagccagaacagacugcacacccugcugccccagacccugagaaaccugcccaagagccugcaggugcugagacugagagacaacuaccuggccuucuucaagugguggagccugcacuuccugcccaagcuggaggugcuggaccuggccggcaaccagcugaaggcccugaccaacggcagccugcccgccggcaccagacugagaagacuggacgugagcugcaacagcaucagcuucguggcccccggcuucuucagcaaggccaaggagcugagagagcugaaccugagcgccaacgcccugaagaccguggaccacagcugguucggcccccuggccagcgcccugcagauccuggacgugagcgccaacccccugcacugcgccugcggcgccgccuucauggacuuccugcuggaggugcaggccgccgugcccggccugcccagcagagugaagugcggcagccccggccagcugcagggccugagcaucuucgcccaggaccugagacugugccuggacgaggcccugagcugggacugcuucgcccugagccugcuggccguggcccugggccugggcgugcccaugcugcaccaccugugcggcugggaccugugguacugcuuccaccugugccuggccuggcugcccuggagaggcagacagagcggcagagacgaggacgcccugcccuacgacgccuucgugguguucgacaagacccagagcgccguggccgacuggguguacaacgagcugagaggccagcuggaggagugcagaggcagaugggcccugagacugugccuggaggagagagacuggcugcccggcaagacccuguucgagaaccugugggccagcguguacggcagcagaaagacccuguucgugcuggcccacaccgacagagugagcggccugcugagagccagcuuccugcuggcccagcagagacugcuggaggacagaaaggacgugguggugcuggugauccugagccccgacggcagaagaagcagauacgugagacugagacagagacugugcagacagagcgugcugcuguggccccaccagcccagcggccagagaagcuucugggcccagcugggcauggcccugaccagagacaaccaccacuucuacaacagaaacuucugccagggccccaccgccgaguga

SEQ ID NO: 9843 - RNA, 3099 nt, Artificial Sequence
  derived and/or modified sequence opt5 from TLR9__Homo_sapiens__AAF72189
augggcuucugcagaagcgcccugcacccccucucccugcuugugcaggcuaucaugcuggccaugacccucgcgcuggggacacuuccugcuuuucugccgugugagcuccaaccccauggacuggucaacugcaauuggcuguuccucaagucuguuccucacuuuagcauggccgcuccccggggcaacgugacgucccugucucuuagcuccaaucgcauucaucaucugcacgacucugauuucgcucaccucccuagccugagacaccuuaaccugaaauggaauugucccccuguggggcucuccccgaugcauuuucccugccacaugaccaucgaaccuagcacauuccuggccguccccacccuggaggaacucaaccugucuuacaauaacauuaugacagugccugcucugcccaagucccugaucagccucucucugucccauaccaauauucuuaugcuggacagcgccucucucgcgggacugcacgcccugcgguuucucuucauggauggcaacuguuauuacaaaaauccgugccgccaggcucuggagguugccccuggggcccuucugggacucggcaaccugacacaccuuucccugaaguauaauaaccucaccgugguccccagaaaucugccuagcucccuggaauaccuccugcuuucuuauaaccggaucgugaaacuggcccccgaggaccucgcgaaccugacggcccugcgcguucuugaugugggcgggaauuguagacggugcgaccaugcucccaacccuuguauggagugcccgcgccacuuuccccagcuccauccugauaccuucagccaccuguccagacuggaaggacucguccugaaggacagcucucuuuccuggcugaaugccagcugguuucggggccucgggaaccugcgcgugcuggaucuuucugagaauuuccucuacaaguguaucacaaaaaccaaggcuuuucagggacugacacaacugagaaaacucaaccugagcuucaauuaucagaagcggguguccuucgcccaucuuucucuggcccccagcuuuggcucccucgucgcucugaaagaacuggacaugcacgggauuuucuuucgcagccuugaugagaccacgcucagaccucuggcgcggcugcccaugcuccagacacugagacuucagaugaacuucaucaaucaagcccagcugggaauuuuucgcgcuuucccgggccuccgguacguugaccugucugauaacagaaucuccggcgccagcgagcugaccgccacaaugggggaagcugacggaggcgagaagguguggcuucagccuggggaccucgcccccgcgccuguggauacccccucuuccgaagacuuucgcccuaauugcagcacccugaacuucacacuggaucucucccggaauaaccuggucacggugcagcccgagauguuugcucaacuuucucaucugcagugccucagacugagccacaauuguauuucccaggccguuaacggaucucaauuccugccgcuuaccggccuucaggugcucgaccugagccacaacaagcucgaucuguaccaugaacacuccuuuacagagcuuccucgccuggaggcccucgaccugagcuauaauucucagcccuucgggaugcagggagucggccacaacuuuuccuucguggcucaucugcggacccuuagacaccugagccucgcccauaauaacauccacucucaaguuucccagcagcugugcagcacaucucuccgcgcucuggauuucagcggcaaugcccuugggcauaugugggcggaaggagaccuguaccuccacuuuuuccagggccuguccgggcugauuuggcuugaucugagccaaaaccggcuccacacccugcucccccagacgcugagaaaucuuccuaaaucucuccaggugcugcgccugcgggacaacuaucuggccuuuuucaagugguggucccuucauuuucugccgaaacucgagguccuggaucucgcuggaaaucagcugaaggcccuuacaaacggcagccugcccgcugggaccagacugcggcgccucgacguguccuguaauucuaucagcuucgucgccccuggcuuuuucuccaaagcgaaggaacugagagagcuuaaccugucugccaaugcucucaaaaccguggaccacagcugguuuggaccccuggccuccgcucuccaaauccuggauguuucugccaacccucuucauugcgccuguggcgcugcguucauggacuuucugcuggaagugcaggccgcuguccccgggcucccuagccgggugaagugcggaucccccggccagcugcaggggcuuagcauuuucgcccaagaucugagacucugucuggacgaggcccucucuugggauugcuuugcucugucccuucuggccguugcgcugggacucggcgugccgaugcugcaccaucuuugugggugggaccugugguacugcuuccaccucugucuggcuuggcugccuuggcgcggccggcagagcggaagagaugaggacgcccuccccuaugaugccuucgucguguuugacaagacacagucugcuguggccgauuggguuuacaaugaacuucgcggccaacuggaggaaugcagagggcggugggcgcugcgccucugccuggaggaaagagacuggcuuccuggaaaaacccuguucgagaaccucugggcuuccgucuauggcagccggaagacacuguuugugcuggcccacacggaucgcgugucugggcuccuuagagccuccuuccugcuggcucagcagcggcuccuggaggaccgcaaagacgucgugguucuugugauccugagccccgauggaagacggucccgcuacgucagacuccggcagagacugugucgccaaagcgugcugcucuggccgcaucagccuucuggccagcggagcuuuugggcccagcuugggauggcucugaccagagacaaccaccauuucuacaaucgcaacuuuugccaaggccccacagccgaauga

SEQ ID NO: 9844 - protein, 522 aa, Artificial Sequence
  TRAF6__Homo_sapiens__Q9Y4K3
MSLLNCENSCGSSQSESDCCVAMASSCSAVTKDDSVGGTASTGNLSSSFMEEIQGYDVEFDPPLESKYECPICLMALREAVQTPCGHRFCKACIIKSIRDAGHKCPVDNEILLENQLFPDNFAKREILSLMVKCPNEGCLHKMELRHLEDHQAHCEFALMDCPQCQRPFQKFHINIHILKDCPRRQVSCDNCAASMAFEDKEIHDQNCPLANVICEYCNTILIREQMPNHYDLDCPTAPIPCTFSTFGCHEKMQRNHLARHLQENTQSHMRMLAQAVHSLSVIPDSGYISEVRNFQETIHQLEGRLVRQDHQIRELTAKMETQSMYVSELKRTIRTLEDKVAEIEAQQCNGIYIWKIGNFGMHLKCQEEEKPVVIHSPGFYTGKPGYKLCMRLHLQLPTAQRCANYISLFVHTMQGEYDSHLPWPFQGTIRLTILDQSEAPVRQNHEEIMDAKPELLAFQRPTIPRNPKGFGYVTFMHLEALRQRTFIKDDTLLVRCEVSTRFDMGSLRREGFQPRSTDAGV

SEQ ID NO: 9845 - RNA, 1569 nt, Artificial Sequence
  TRAF6__Homo_sapiens__AAB38751
augagucugcuaaacugugaaaacagcuguggauccagccagucugaaagugacugcuguguggccauggccagcuccuguagcgcuguaacaaaagaugauaguguggguggaacugccagcacggggaaccucuccagcucauuuauggaggagauccagggauaugauguagaguuugacccaccccuggaaagcaaguaugaaugccccaucugcuugauggcauuacgagaagcagugcaaacgccaugcggccauagguucugcaaagccugcaucauaaaaucaauaagggaugcaggucacaaauguccaguugacaaugaaauacugcuggaaaaucaacuauuuccagacaauuuugcaaaacgugagauucuuucucugauggugaaauguccaaaugaagguuguuugcacaagauggaacugagacaucuugaggaucaucaagcacauugugaguuugcucuuauggauuguccccaaugccagcgucccuuccaaaaauuccauauuaauauucacauucugaaggauuguccaaggagacagguuucuugugacaacugugcugcaucaauggcauuugaagauaaagagauccaugaccagaacuguccuuuggcaaaugucaucugugaauacugcaauacuauacucaucagagaacagaugccuaaucauuaugaucuagacugcccuacagccccaauuccaugcacauucaguacuuuugguugccaugaaaagaugcagaggaaucacuuggcacgccaccuacaagagaacacccagucacacaugagaauguuggcccaggcuguucauaguuugagcguuauacccgacucuggguauaucucagagguccggaauuuccaggaaacuauucaccaguuagagggucgccuuguaagacaagaccaucaaauccgggagcugacugcuaaaauggaaacucagaguauguauguaagugagcucaaacgaaccauucgaacccuugaggacaaaguugcugaaaucgaagcacagcagugcaauggaauuuauauuuggaagauuggcaacuuuggaaugcauuugaaaugucaagaagaggagaaaccuguugugauucauagcccuggauucuacacuggcaaacccggguacaaacugugcaugcgcuugcaccuucaguuaccgacugcucagcgcugugcaaacuauauaucccuuuuuguccacacaaugcaaggagaauaugacagccaccucccuuggcccuuccaggguacaauacgccuuacaauucuugaucagucugaagcaccuguaaggcaaaaccacgaagagauaauggaugccaaaccagagcugcuugcuuuccagcgacccacaaucccacggaacccaaaagguuuuggcuauguaacuuuuaugcaucuggaagcccuaagacaaagaacuuucauuaaggaugacacauuauuagugcgcugugaggucuccacccgcuuugacauggguagccuucggagggaggguuuucagccacgaaguacugaugcagggguauag

SEQ ID NO: 9846 - RNA, 1569 nt, Artificial Sequence
  derived and/or modified sequence opt1 from TRAF6__Homo_sapiens__AAB38751
augagccugcucaacugcgagaacuccugcggcagcucccagagcgaguccgacugcugcguggccauggccagcuccugcagcgcggucaccaaggacgacuccgucgggggcaccgccagcacggggaaccuguccagcuccuucauggaggagauccagggcuacgacguggaguucgacccgccccuggagagcaaguacgagugccccaucugccucauggcccugcgcgaggccgugcagacccccugcgggcaccgguucugcaaggccugcaucaucaaguccauccgcgacgcgggccacaagugccccguggacaacgagauccugcucgagaaccagcuguucccggacaacuucgccaagcgggagauccugagccucauggugaagugccccaacgagggcugccugcacaagauggagcugcgccaccucgaggaccaccaggcccacugcgaguucgcccugauggacugcccccagugccagcggcccuuccagaaguuccacaucaacauccacauccugaaggacugcccgcgccggcaggucuccugcgacaacugcgcggccagcauggccuucgaggacaaggagauccacgaccagaacugcccccucgccaacgugaucugcgaguacugcaacaccauccugauccgcgagcagaugcccaaccacuacgaccuggacugccccaccgccccgauccccugcacguucuccaccuucgggugccacgagaagaugcagcggaaccaccucgcgcgccaccuccaggagaacacccagagccacaugcggaugcuggcccaggccgugcacagccuguccgucauccccgacagcggcuacaucuccgaggugcgcaacuuccaggagaccauccaccagcuggaggggcggcuggugcgccaggaccaccagauccgggagcucacggccaagauggagacccagagcauguacgucuccgagcugaagcgcaccauccggacccuggaggacaagguggccgagaucgaggcgcagcagugcaacggcaucuacaucuggaagaucgggaacuucggcaugcaccucaagugccaggaggaggagaagcccguggucauccacagcccgggcuucuacacggggaagcccggcuacaagcugugcaugcgccugcaccuccagcugcccaccgcccagcggugcgccaacuacaucucccuguucgugcacaccaugcagggggaguacgacagccaccuccccuggccguuccagggcaccauccgccugacgauccuggaccaguccgaggcccccgugcggcagaaccacgaggagaucauggacgccaagcccgagcuccuggcguuccagcgccccaccaucccgcgcaaccccaagggcuucggguacgucaccuucaugcaccuggaggcccuccggcagcgcaccuucaucaaggacgacacgcugcuggugcggugcgaggugagcacccgcuucgacaugggcucccuccggcgcgagggguuccagccccggagcaccgacgccggcgucuga

SEQ ID NO: 9847 - RNA, 1569 nt, Artificial Sequence
  derived and/or modified sequence opt2 from TRAF6__Homo_sapiens__AAB38751
augucccuccucaacugcgagaacuccugcggcuccucccaguccgaguccgacugcugcgucgccauggccuccuccugcuccgccgucaccaaggacgacuccgucggcggcaccgccuccaccggcaaccucuccuccuccuucauggaggagauccagggcuacgacgucgaguucgaccccccccucgaguccaaguacgagugccccaucugccucauggcccuccgcgaggccguccagacccccugcggccaccgcuucugcaaggccugcaucaucaaguccauccgcgacgccggccacaagugccccgucgacaacgagauccuccucgagaaccagcucuuccccgacaacuucgccaagcgcgagauccucucccucauggucaagugccccaacgagggcugccuccacaagauggagcuccgccaccucgaggaccaccaggcccacugcgaguucgcccucauggacugcccccagugccagcgccccuuccagaaguuccacaucaacauccacauccucaaggacugcccccgccgccaggucuccugcgacaacugcgccgccuccauggccuucgaggacaaggagauccacgaccagaacugcccccucgccaacgucaucugcgaguacugcaacaccauccucauccgcgagcagaugcccaaccacuacgaccucgacugccccaccgcccccauccccugcaccuucuccaccuucggcugccacgagaagaugcagcgcaaccaccucgcccgccaccuccaggagaacacccagucccacaugcgcaugcucgcccaggccguccacucccucuccgucauccccgacuccggcuacaucuccgagguccgcaacuuccaggagaccauccaccagcucgagggccgccucguccgccaggaccaccagauccgcgagcucaccgccaagauggagacccaguccauguacgucuccgagcucaagcgcaccauccgcacccucgaggacaaggucgccgagaucgaggcccagcagugcaacggcaucuacaucuggaagaucggcaacuucggcaugcaccucaagugccaggaggaggagaagcccgucgucauccacucccccggcuucuacaccggcaagcccggcuacaagcucugcaugcgccuccaccuccagcuccccaccgcccagcgcugcgccaacuacaucucccucuucguccacaccaugcagggcgaguacgacucccaccuccccuggcccuuccagggcaccauccgccucaccauccucgaccaguccgaggcccccguccgccagaaccacgaggagaucauggacgccaagcccgagcuccucgccuuccagcgccccaccaucccccgcaaccccaagggcuucggcuacgucaccuucaugcaccucgaggcccuccgccagcgcaccuucaucaaggacgacacccuccucguccgcugcgaggucuccacccgcuucgacaugggcucccuccgccgcgagggcuuccagccccgcuccaccgacgccggcgucuga

SEQ ID NO: 9848 - RNA, 1569 nt, Artificial Sequence
  derived and/or modified sequence opt3 from TRAF6__Homo_sapiens__AAB38751
augagccugcucaacugcgaaaauuccugugggucuucacagagugagagcgacugcuguguggccauggcuuccucuugcucggcagucaccaaggaugacucaguuggcggaacagccagcacugguaaccuuaguuccucuuucauggaggaaauccaaggcuacgauguggaguuugaucccccucuggaaagcaaauaugaguguccaauuugcuugauggcguuaagagaggcuguacagacgccgugugggcacagguucugcaaggccuguauaaucaaauccauucgggacgcaggacauaagugccccguggacaaugaaauccugcuagagaaccagcucuuuccugauaauuucgccaaacgcgaaauucugucacuuauggucaaguguccaaacgagggcugccugcacaagauggaguugcgacaucucgaagaccaccaggcucauugcgaguuugcacugauggauuguccccaaugccagcguccuuuccagaaauuucacaucaauauacacauccugaaggacuguccaagacgccaggugaguugcgauaacugugccgcuagcauggccuucgaagacaaagagauucaugaucaaaauugcccccucgcgaacguuaucugugaauacugcaauaccauuuuaauccgggagcagaugccuaaccacuaugaccuggacuguccaacagcaccgauacccugcacuuuuucuaccuucgguugucaugagaagaugcagcgcaaucaccuugccagacacuugcaggaaaacacacaaucccauaugaggaugcuggcucaggccgugcacucacuaagcgucauuccugauaguggguacaucucugaggugcggaauuuucaggaaaccauucaucaacucgagggacgccugguacgacaggaccaccagaucagagaacuuacugcaaaaauggagacacaguccauguauguuagcgagcugaagaggaccauccggacguuggaagauaagguggcugagauugaagcccaacagugcaacggcauauacaucuggaaaauuggcaacuucgggaugcaucucaagugccaggaggaagagaaaccagucgugauccacucgcccggauuuuauacugguaagccuggcuacaaacuguguaugcguuuacaucugcagcucccaaccgcgcaacgcugcgccaauuacauaucucuuuucgugcacacaaugcagggggaguaugacucccaucugcccuggccguuccagggaacuauuagauugaccauccuagaucagucagaagcaccugucaggcaaaaccacgaggaaaucauggacgcuaagcccgagcugcucgccuuucagcggccaacaauuccucgaaaucccaaaggcuucgguuacguuaccuuuaugcaccuggaggcucuuaggcagagaacguucaucaaggaugacacucuguuggugaggugugaaguaaguacacgguuugauauggggagccuccgcagagagggauuccagccaagguccaccgacgccggcguguga

SEQ ID NO: 9849 - RNA, 1569 nt, Artificial Sequence
  derived and/or modified sequence opt4 from TRAF6__Homo_sapiens__AAB38751
augagccugcugaacugcgagaacagcugcggcagcagccagagcgagagcgacugcugcguggccauggccagcagcugcagcgccgugaccaaggacgacagcgugggcggcaccgccagcaccggcaaccugagcagcagcuucauggaggagauccagggcuacgacguggaguucgaccccccccuggagagcaaguacgagugccccaucugccugauggcccugagagaggccgugcagacccccugcggccacagauucugcaaggccugcaucaucaagagcaucagagacgccggccacaagugccccguggacaacgagauccugcuggagaaccagcuguuccccgacaacuucgccaagagagagauccugagccugauggugaagugccccaacgagggcugccugcacaagauggagcugagacaccuggaggaccaccaggcccacugcgaguucgcccugauggacugcccccagugccagagacccuuccagaaguuccacaucaacauccacauccugaaggacugccccagaagacaggugagcugcgacaacugcgccgccagcauggccuucgaggacaaggagauccacgaccagaacugcccccuggccaacgugaucugcgaguacugcaacaccauccugaucagagagcagaugcccaaccacuacgaccuggacugccccaccgcccccauccccugcaccuucagcaccuucggcugccacgagaagaugcagagaaaccaccuggccagacaccugcaggagaacacccagagccacaugagaaugcuggcccaggccgugcacagccugagcgugauccccgacagcggcuacaucagcgaggugagaaacuuccaggagaccauccaccagcuggagggcagacuggugagacaggaccaccagaucagagagcugaccgccaagauggagacccagagcauguacgugagcgagcugaagagaaccaucagaacccuggaggacaagguggccgagaucgaggcccagcagugcaacggcaucuacaucuggaagaucggcaacuucggcaugcaccugaagugccaggaggaggagaagcccguggugauccacagccccggcuucuacaccggcaagcccggcuacaagcugugcaugagacugcaccugcagcugcccaccgcccagagaugcgccaacuacaucagccuguucgugcacaccaugcagggcgaguacgacagccaccugcccuggcccuuccagggcaccaucagacugaccauccuggaccagagcgaggcccccgugagacagaaccacgaggagaucauggacgccaagcccgagcugcuggccuuccagagacccaccauccccagaaaccccaagggcuucggcuacgugaccuucaugcaccuggaggcccugagacagagaaccuucaucaaggacgacacccugcuggugagaugcgaggugagcaccagauucgacaugggcagccugagaagagagggcuuccagcccagaagcaccgacgccggcguguga

SEQ ID NO: 9850 - RNA, 1569 nt, Artificial Sequence
  derived and/or modified sequence opt5 from TRAF6__Homo_sapiens__AAB38751
augagccugcucaacugcgagaauagcuguggcucuagccaguccgaaucugacugcuguguggccauggcuagcuccugcucugccgucaccaaggaugacagcguugggggaacagcguccacgggcaaccuguccucuuccuucauggaggaaauccaaggguacgauguggaguuugaucccccucuugaaagcaaauaugaguguccgauuugccugauggcucucagagaggccgugcagacccccuguggacaccgguucugcaaggccuguaucauuaaaucuauccgcgacgcuggccauaagugcccugucgacaaugaaauucugcuugagaaccagcuguuucccgauaauuucgccaaaagagaaauccucucccugauggugaaguguccuaacgaggggugccugcacaagauggagcuccggcaucuggaagaccaccaggcucauugcgaguuugcccuuauggauuguccccaaugccagcgcccuuuccagaaauuucacaucaauauucacauccugaaggacuguccgagacggcagguuagcugcgauaacugugcggccucuauggcuuucgaagacaaagagauucaugaucaaaauugcccccucgccaacgugaucugugaauacugcaauacaauucugauccgcgagcagaugccuaaccacuaugaccuugacugucccaccgcuccuauucccugcacauuuuccaccuucggaugucaugagaagaugcagagaaaucaccuggcccggcaccuccaggaaaacacacaaagccauaugcgcaugcuggcgcaggccguccacucccugucugugaucccggauagcggcuacaucuccgagguuagaaauuuucaggaaaccauucaucaacucgagggccggcuggugcgccaggaccaccagaucagagaacuuacggcuaaaauggagacccagagcauguaugucucugagcugaagcggacaauucgcacccucgaagauaagguggccgagaucgaagcucaacagugcaacgggauuuacaucuggaaaaucggaaacuucggcaugcaucugaagugccaggaggaagagaaaccuguggucauucacucccccggguuuuauacaggaaagccuggcuacaaacuuuguaugagacugcaccuccagcugcccaccgcccaacggugcgccaauuacaucagccuguucguucauacgaugcagggggaguaugacucucaccuccccuggccuuuccagggaacaauuagacugaccauccuugaucagagcgaagcuccggugcgccaaaaccaugaggaaauuauggacgcgaagcccgagcugcucgccuuucagcggccuacaauccccagaaauccuaaaggcuucggcuacgugaccuuuaugcaccuggaggcccuucgccagcggaccuucaucaaggaugacacacugcucgucagaugugaaguguccacgcgcuuugauauggggucucugcggagagagggauuccagccccgcagcaccgacgcuggcguuuga

SEQ ID NO: 9851 - protein, 257 aa, Artificial Sequence
  c-myc__Homo_sapiens__A0A0B4J1R1
MPLNVSFTNRNYDLDYDSVQPYFYCDEEENFYQQQQQSELQPPAPSEDIWKKFELLPTPPLSPSRRSGLCSPSYVAVTPFSLRGDNDGGGGSFSTADQLEMVTELLGGDMVNQSFICDPDDETFIKNIIIQDCMWSGFSAAAKLVSEKLASYQAARKDSGSPNPARGHSVCSTSSLYLQDLSAAASECIDPSVVFPYPLNDSSSPKSCASQDSSAFSPSSDSLLSSTESSPQGSPEPLVLHEETPPTTSSDSGGTRR

SEQ ID NO: 9852 - RNA, 774 nt, Artificial Sequence
  c-myc__Homo_sapiens__EAW92099
augccccucaacguuagcuucaccaacaggaacuaugaccucgacuacgacucggugcagccguauuucuacugcgacgaggaggagaacuucuaccagcagcagcagcagagcgagcugcagcccccggcgcccagcgaggauaucuggaagaaauucgagcugcugcccaccccgccccuguccccuagccgccgcuccgggcucugcucgcccuccuacguugcggucacacccuucucccuucggggagacaacgacggcgguggcgggagcuucuccacggccgaccagcuggagauggugaccgagcugcugggaggagacauggugaaccagaguuucaucugcgacccggacgacgagaccuucaucaaaaacaucaucauccaggacuguauguggagcggcuucucggccgccgccaagcucgucucagagaagcuggccuccuaccaggcugcgcgcaaagacagcggcagcccgaaccccgcccgcggccacagcgucugcuccaccuccagcuuguaccugcaggaucugagcgccgccgccucagagugcaucgaccccucgguggucuuccccuacccucucaacgacagcagcucgcccaaguccugcgccucgcaagacuccagcgccuucucuccguccucggauucucugcucuccucgacggaguccuccccgcagggcagccccgagccccuggugcuccaugaggagacaccgcccaccaccagcagcgacucuggaggaacaagaagauga

SEQ ID NO: 9853 - RNA, 774 nt, Artificial Sequence
  derived and/or modified sequence opt1 from c-myc__Homo_sapiens__EAW92099
augccccugaacgugagcuucaccaaccgcaacuacgaccucgacuacgacuccguccagcccuacuucuacugcgacgaggaggagaacuucuaccagcagcagcagcagagcgagcugcagccgcccgcccccuccgaggacaucuggaagaaguucgagcugcucccgaccccgccccugagccccucccggcgcagcggccugugcucccccagcuacguggccgugacgcccuucucccuccgcggggacaacgacggcgggggcgggagcuucuccaccgcggaccagcuggagauggucaccgagcugcucggcggcgacauggugaaccagagcuucaucugcgaccccgacgacgagaccuucaucaagaacaucaucauccaggacugcaugugguccggguucagcgccgccgccaagcugguguccgagaagcuggccagcuaccaggcggcccggaaggacuccggcagccccaacccggcccgggggcacuccgucugcagcacgagcucccucuaccugcaggaccugagcgccgcggccuccgagugcaucgaccccagcgugguguuccccuacccccucaacgacuccagcucccccaagagcugcgccucccaggacagcuccgccuucagccccuccagcgacucccugcugagcuccaccgagagcagcccccagggcucccccgagccgcucguccugcacgaggagaccccgcccaccacgagcuccgacagcgggggcacccgccgguga

SEQ ID NO: 9854 - RNA, 774 nt, Artificial Sequence
  derived and/or modified sequence opt2 from c-myc__Homo_sapiens__EAW92099
augccccucaacgucuccuucaccaaccgcaacuacgaccucgacuacgacuccguccagcccuacuucuacugcgacgaggaggagaacuucuaccagcagcagcagcaguccgagcuccagccccccgcccccuccgaggacaucuggaagaaguucgagcuccuccccacccccccccucucccccucccgccgcuccggccucugcucccccuccuacgucgccgucacccccuucucccuccgcggcgacaacgacggcggcggcggcuccuucuccaccgccgaccagcucgagauggucaccgagcuccucggcggcgacauggucaaccaguccuucaucugcgaccccgacgacgagaccuucaucaagaacaucaucauccaggacugcaugugguccggcuucuccgccgccgccaagcucgucuccgagaagcucgccuccuaccaggccgcccgcaaggacuccggcucccccaaccccgcccgcggccacuccgucugcuccaccuccucccucuaccuccaggaccucuccgccgccgccuccgagugcaucgaccccuccgucgucuuccccuacccccucaacgacuccuccucccccaaguccugcgccucccaggacuccuccgccuucucccccuccuccgacucccuccucuccuccaccgaguccuccccccagggcucccccgagccccucguccuccacgaggagaccccccccaccaccuccuccgacuccggcggcacccgccgcuga

SEQ ID NO: 9855 - RNA, 774 nt, Artificial Sequence
  derived and/or modified sequence opt3 from c-myc__Homo_sapiens__EAW92099
augccccugaacgugagcuucaccaauagaaacuacgaccucgauuaugacuccguccagccuuacuuuuauugcgaugaggaagagaauuucuaccaacagcagcagcaaucugaacuucagccaccggcccccucagaggacaucuggaagaaauuugaacuguugccuacaccacccuuaaguccuagcaggcgguccggccuguguucuccaucguauguugcugugacucccuucucacuacgcggggauaacgacggagguggcgggagcuuuaguacggcagaucagcucgagaugguaaccgagcugcuuggaggcgacauggugaaucaguccuucauuugcgauccugacgaugaaacauuuauaaagaacaucauuauccaagacuguauguggucugguuucagcgccgcggcuaaacuggucuccgagaaguuggccucauaccaggcagcccgaaaagauagugggagcccaaauccggcucguggacacucugugugcuccacuucaagccucuaucugcaggaccugagugcagccgcuucugaauguauugaccccuccguuguguuuccuuacccacucaacgauagcucgucucccaaguccugcgccucacaggacaguagcgcguucuccccuucuagcgauucauuacugaguuccaccgagagcucuccacaaggcucacccgagccgcuugucuugcaugaagagacaccucccaccacaaguagcgacuccggcgggacuagaagguga

SEQ ID NO: 9856 - RNA, 774 nt, Artificial Sequence
  derived and/or modified sequence opt4 from c-myc__Homo_sapiens__EAW92099
augccccugaacgugagcuucaccaacagaaacuacgaccuggacuacgacagcgugcagcccuacuucuacugcgacgaggaggagaacuucuaccagcagcagcagcagagcgagcugcagccccccgcccccagcgaggacaucuggaagaaguucgagcugcugcccacccccccccugagccccagcagaagaagcggccugugcagccccagcuacguggccgugacccccuucagccugagaggcgacaacgacggcggcggcggcagcuucagcaccgccgaccagcuggagauggugaccgagcugcugggcggcgacauggugaaccagagcuucaucugcgaccccgacgacgagaccuucaucaagaacaucaucauccaggacugcauguggagcggcuucagcgccgccgccaagcuggugagcgagaagcuggccagcuaccaggccgccagaaaggacagcggcagccccaaccccgccagaggccacagcgugugcagcaccagcagccuguaccugcaggaccugagcgccgccgccagcgagugcaucgaccccagcgugguguuccccuacccccugaacgacagcagcagccccaagagcugcgccagccaggacagcagcgccuucagccccagcagcgacagccugcugagcagcaccgagagcagcccccagggcagccccgagccccuggugcugcacgaggagaccccccccaccaccagcagcgacagcggcggcaccagaagauga

SEQ ID NO: 9857 - RNA, 774 nt, Artificial Sequence
  derived and/or modified sequence opt5 from c-myc__Homo_sapiens__EAW92099
augccccugaacgugagcuucaccaauagaaacuacgaccucgauuaugacuccguccagccuuacuuuuauugcgaugaggaagagaauuucuaccaacagcagcagcaaucugaacugcagccgcccgccccuagcgaggacaucuggaagaaauuugaacuucugcccacaccuccccucuccccuucucggcgcagcggccuguguuccccgucuuauguugcugugacgcccuucagccuuagaggggauaacgacggaggcgggggauccuuuagcaccgccgaucagcuggagauggugacagagcuccugggcggggacauggucaaucagucuuucauuugcgauccugacgaugaaaccuuuaucaagaacauuaucauucaagacuguaugugguccggauucagcgcggcugccaaacuggugucugagaagcucgccuccuaccaggcugcccggaaagauagcggcucucccaauccugcucgcggccacuccguuugcagcacauccucucuguaucuucaggaccugagcgccgcggccuccgaauguaucgaccccagcguggucuuuccguacccucucaacgauucuuccagccccaagucuugcgcuagccaggacuccucugccuucagcccuuccagcgauucucugcuuuccagcaccgagucuagcccccaagggucccccgagccucuggugcuccaugaagagacaccgcccaccacguccucugacagcggaggcaccagacgguga

SEQ ID NO: 9858 - RNA, 774 nt, Artificial Sequence
  derived and/or modified sequence opt6 from c-myc__Homo_sapiens__EAW92099
augccacuaaacguaucuuucacaaauagaaacuacgaccuagacuacgacucaguacaaccauacuuuuacugcgacgaagaagaaaacuucuaccaacaacaacaacaaucagaacuacaaccacccgcaccauccgaagacaucuggaaaaaauucgaauuacuaccaacaccacccuuaucaccaucaagaagaucaggacuauguucaccauccuacguagcuguaacaccauucucacuaagaggagacaacgauggaggaggaggaucauucucaacagcagaccaacuagaaaugguaacagaacuacucggaggcgacaugguaaaucaaucauucauaugcgaccccgacgaugaaacauucaucaaaaauaucauaauacaagacugcauguggucaggauucucagcagcugcaaaacucguaucagaaaaacuagccucauaccaagcagcaagaaaagacucaggaucaccaaacccagcaagaggacacucaguaugcucaacaucaucauuauaccuacaagacuuaucagcagcagcaucagaaugcauagacccaucagucguauucccauacccacuaaacgacucaucuucaccuaaauccugcgcaucacaagauucaucagcauucucaccaucaucagacucacuacuaucaucaacagaaucaucaccccaaggcucaccagaaccauuaguauuacacgaagaaacaccaccaacaaccucaucugacucuggaggaacaagaagauaa

SEQ ID NO: 9859 - protein, 439 aa, Artificial Sequence
  c-myc__Homo_sapiens__P01106
MPLNVSFTNRNYDLDYDSVQPYFYCDEEENFYQQQQQSELQPPAPSEDIWKKFELLPTPPLSPSRRSGLCSPSYVAVTPFSLRGDNDGGGGSFSTADQLEMVTELLGGDMVNQSFICDPDDETFIKNIIIQDCMWSGFSAAAKLVSEKLASYQAARKDSGSPNPARGHSVCSTSSLYLQDLSAAASECIDPSVVFPYPLNDSSSPKSCASQDSSAFSPSSDSLLSSTESSPQGSPEPLVLHEETPPTTSSDSEEEQEDEEEIDVVSVEKRQAPGKRSESGSPSAGGHSKPPHSPLVLKRCHVSTHQHNYAAPPSTRKDYPAAKRVKLDSVRVLRQISNNRKCTSPRSSDTEENVKRRTHNVLERQRRNELKRSFFALRDQIPELENNEKAPKVVILKKATAYILSVQAEEQKLISEEDLLRKRREQLKHKLEQLRNSCA

SEQ ID NO: 9860 - RNA, 1320 nt, Artificial Sequence
  c-myc__Homo_sapiens__AAA36340
augccccucaacguuagcuucaccaacaggaacuaugaccucgacuacgacucggugcagccguauuucuacugcgacgaggaggagaacuucuaccagcagcagcagcagagcgagcugcagcccccggcgcccagcgaggauaucuggaagaaauucgagcugcugcccaccccgccccuguccccuagccgccgcuccgggcucugcucgcccuccuacguugcggucacacccuucucccuucggggagacaacgacggcgguggcgggagcuucuccacggccgaccagcuggagauggugaccgagcugcugggaggagacauggugaaccagaguuucaucugcgacccggacgacgagaccuucaucaaaaacaucaucauccaggacuguauguggagcggcuucucggccgccgccaagcucgucucagagaagcuggccuccuaccaggcugcgcgcaaagacagcggcagcccgaaccccgcccgcggccacagcgucugcuccaccuccagcuuguaccugcaggaucugagcgccgccgccucagagugcaucgaccccucgguggucuuccccuacccucucaacgacagcagcucgcccaaguccugcgccucgcaagacuccagcgccuucucuccguccucggauucucugcucuccucgacggaguccuccccgcagggcagccccgagccccuggugcuccaugaggagacaccgcccaccaccagcagcgacucugaggaggaacaagaagaugaggaagaaaucgauguuguuucuguggaaaagaggcaggcuccuggcaaaaggucagagucuggaucaccuucugcuggaggccacagcaaaccuccucacagcccacugguccucaagaggugccacgucuccacacaucagcacaacuacgcagcgccucccuccacucggaaggacuauccugcugccaagagggucaaguuggacagugucagaguccugagacagaucagcaacaaccgaaaaugcaccagccccagguccucggacaccgaggagaaugucaagaggcgaacacacaacgucuuggagcgccagaggaggaacgagcuaaaacggagcuuuuuugcccugcgugaccagaucccggaguuggaaaacaaugaaaaggcccccaagguaguuauccuuaaaaaagccacagcauacauccuguccguccaagcagaggagcaaaagcucauuucugaagaggacuuguugcggaaacgacgagaacaguugaaacacaaacuugaacagcuacggaacucuugugcguaa

SEQ ID NO: 9861 - RNA, 1320 nt, Artificial Sequence
  derived and/or modified sequence opt1 from c-myc__Homo_sapiens__AAA36340
augccccugaacgugagcuucaccaaccgcaacuacgaccucgacuacgacuccguccagccguacuucuacugcgacgaggaggagaacuucuaccagcagcagcagcagagcgagcugcagccgcccgcccccuccgaggacaucuggaagaaguucgagcugcucccgaccccgccccugagccccucccggcgcagcggccugugcucccccagcuacguggccgugacgcccuucucccuccgcggggacaacgacggcgggggcgggagcuucuccaccgcggaccagcuggagauggucaccgagcugcucggcggcgacauggugaaccagagcuucaucugcgaccccgacgacgagaccuucaucaagaacaucaucauccaggacugcaugugguccggguucagcgccgccgccaagcugguguccgagaagcuggccagcuaccaggcggcccggaaggacuccggcagccccaacccggcccgggggcacuccgucugcagcacgagcucccucuaccugcaggaccugagcgccgcggccuccgagugcaucgaccccagcgugguguuccccuacccccucaacgacuccagcucccccaagagcugcgccucccaggacagcuccgccuucagccccuccagcgacucccugcugagcuccaccgagagcagcccccagggcucccccgagccgcucguccugcacgaggagaccccgcccaccacgagcuccgacagcgaggaggagcaggaggacgaggaggagaucgacgugguguccgucgagaagcgccaggcccccgggaagcggagcgaguccggcagccccuccgcgggcgggcacagcaagccgccccacagcccccuggugcucaagcgcugccacguguccacccaccagcacaacuacgccgccccgcccuccacccggaaggacuaccccgccgccaagcgcgucaagcuggacagcgugcgggugcugcgccagaucuccaacaaccggaagugcaccagcccccgcuccagcgacacggaggagaacgucaagcggcgcacccacaacgugcucgagcggcagcgccggaacgagcugaagcgcuccuucuucgcgcugcgggaccagauccccgagcucgagaacaacgagaaggcccccaagguggucauccugaagaaggccaccgccuacauccugagcgugcaggccgaggagcagaagcucaucagcgaggaggaccugcugcgcaagcgccgggagcagcucaagcacaagcuggagcagcugcgcaacuccugcgcguga

SEQ ID NO: 9862 - RNA, 1320 nt, Artificial Sequence
  derived and/or modified sequence opt2 from c-myc__Homo_sapiens__AAA36340
augccccucaacgucuccuucaccaaccgcaacuacgaccucgacuacgacuccguccagcccuacuucuacugcgacgaggaggagaacuucuaccagcagcagcagcaguccgagcuccagccccccgcccccuccgaggacaucuggaagaaguucgagcuccuccccacccccccccucucccccucccgccgcuccggccucugcucccccuccuacgucgccgucacccccuucucccuccgcggcgacaacgacggcggcggcggcuccuucuccaccgccgaccagcucgagauggucaccgagcuccucggcggcgacauggucaaccaguccuucaucugcgaccccgacgacgagaccuucaucaagaacaucaucauccaggacugcaugugguccggcuucuccgccgccgccaagcucgucuccgagaagcucgccuccuaccaggccgcccgcaaggacuccggcucccccaaccccgcccgcggccacuccgucugcuccaccuccucccucuaccuccaggaccucuccgccgccgccuccgagugcaucgaccccuccgucgucuuccccuacccccucaacgacuccuccucccccaaguccugcgccucccaggacuccuccgccuucucccccuccuccgacucccuccucuccuccaccgaguccuccccccagggcucccccgagccccucguccuccacgaggagaccccccccaccaccuccuccgacuccgaggaggagcaggaggacgaggaggagaucgacgucgucuccgucgagaagcgccaggcccccggcaagcgcuccgaguccggcucccccuccgccggcggccacuccaagcccccccacuccccccucguccucaagcgcugccacgucuccacccaccagcacaacuacgccgccccccccuccacccgcaaggacuaccccgccgccaagcgcgucaagcucgacuccguccgcguccuccgccagaucuccaacaaccgcaagugcaccuccccccgcuccuccgacaccgaggagaacgucaagcgccgcacccacaacguccucgagcgccagcgccgcaacgagcucaagcgcuccuucuucgcccuccgcgaccagauccccgagcucgagaacaacgagaaggcccccaaggucgucauccucaagaaggccaccgccuacauccucuccguccaggccgaggagcagaagcucaucuccgaggaggaccuccuccgcaagcgccgcgagcagcucaagcacaagcucgagcagcuccgcaacuccugcgccuga

SEQ ID NO: 9863 - RNA, 1320 nt, Artificial Sequence
  derived and/or modified sequence opt3 from c-myc__Homo_sapiens__AAA36340
augccccugaacgugagcuucaccaauagaaacuacgaccucgauuaugacuccguccagccuuacuuuuauugcgaugaggaagagaauuucuaccaacagcagcagcaaucugaacuucagccaccggcccccucagaggacaucuggaagaaauuugaacuguugccuacaccacccuuaaguccuagcaggcgguccggccuguguucuccaucguauguugcugugacucccuucucacuacgcggggauaacgacggagguggcgggagcuuuaguacggcagaucagcucgagaugguaaccgagcugcuuggaggcgacauggugaaucaguccuucauuugcgauccugacgaugaaacauuuauaaagaacaucauuauccaagacuguauguggucugguuucagcgccgcggcuaaacuggucuccgagaaguuggccucauaccaggcagcccgaaaagauagugggagcccaaauccggcucguggacacucugugugcuccacuucaagccucuaucugcaggaccugagugcagccgcuucugaauguauugaccccuccguuguguuuccuuacccacucaacgauagcucgucucccaaguccugcgccucacaggacaguagcgcguucuccccuucuagcgauucauuacugaguuccaccgagagcucuccacaaggcucacccgagccgcuugucuugcaugaagagacaccucccaccacaaguagcgacuccgaagaggaacaggaggaugaggaagagaucgacgugguaucuguugaaaagagacaggcaccaggcaaaaggucggagagcggguccccuucagccggaggucacaguaagcccccacauucuccccuggugcuaaaacggugucacgucagcacucaucaacacaauuacgcugccccuccauccacccgcaaggauuauccggcagcuaaaagagugaagcucgacucagugaggguccugcggcagauaagcaacaaucgcaagugcacgucuccccgauccagugauacugaagagaacguuaaaagaaggacccacaaugugcuugagcggcagcgucgcaacgaacugaagaggagcuuuuucgccuugagagaccagaucccugagcucgaaaauaacgagaaagcgccaaagguagugauucugaaaaaggccacagcauacaucuuaucuguccaagcugaggaacagaaacugauuuccgaggaagaucuccuucggaagcgacgcgagcagcugaagcauaaauuggaacagcuaagaaacucaugugccuga

SEQ ID NO: 9864 - RNA, 1320 nt, Artificial Sequence
  derived and/or modified sequence opt4 from c-myc__Homo_sapiens__AAA36340
augccccugaacgugagcuucaccaacagaaacuacgaccuggacuacgacagcgugcagcccuacuucuacugcgacgaggaggagaacuucuaccagcagcagcagcagagcgagcugcagccccccgcccccagcgaggacaucuggaagaaguucgagcugcugcccacccccccccugagccccagcagaagaagcggccugugcagccccagcuacguggccgugacccccuucagccugagaggcgacaacgacggcggcggcggcagcuucagcaccgccgaccagcuggagauggugaccgagcugcugggcggcgacauggugaaccagagcuucaucugcgaccccgacgacgagaccuucaucaagaacaucaucauccaggacugcauguggagcggcuucagcgccgccgccaagcuggugagcgagaagcuggccagcuaccaggccgccagaaaggacagcggcagccccaaccccgccagaggccacagcgugugcagcaccagcagccuguaccugcaggaccugagcgccgccgccagcgagugcaucgaccccagcgugguguuccccuacccccugaacgacagcagcagccccaagagcugcgccagccaggacagcagcgccuucagccccagcagcgacagccugcugagcagcaccgagagcagcccccagggcagccccgagccccuggugcugcacgaggagaccccccccaccaccagcagcgacagcgaggaggagcaggaggacgaggaggagaucgacguggugagcguggagaagagacaggcccccggcaagagaagcgagagcggcagccccagcgccggcggccacagcaagcccccccacagcccccuggugcugaagagaugccacgugagcacccaccagcacaacuacgccgccccccccagcaccagaaaggacuaccccgccgccaagagagugaagcuggacagcgugagagugcugagacagaucagcaacaacagaaagugcaccagccccagaagcagcgacaccgaggagaacgugaagagaagaacccacaacgugcuggagagacagagaagaaacgagcugaagagaagcuucuucgcccugagagaccagauccccgagcuggagaacaacgagaaggcccccaagguggugauccugaagaaggccaccgccuacauccugagcgugcaggccgaggagcagaagcugaucagcgaggaggaccugcugagaaagagaagagagcagcugaagcacaagcuggagcagcugagaaacagcugcgccuga

SEQ ID NO: 9865 - RNA, 1320 nt, Artificial Sequence
  derived and/or modified sequence opt5 from c-myc__Homo_sapiens__AAA36340
augccccugaacgugagcuucaccaauagaaacuacgaccucgauuaugacuccguccagccuuacuuuuauugcgaugaggaagagaauuucuaccaacagcagcagcaaucugaacugcagccgcccgccccuagcgaggacaucuggaagaaauuugaacuucugcccacaccuccccucuccccuucucggcgcagcggccuguguuccccgucuuauguugcugugacgcccuucagccuuagaggggauaacgacggaggcgggggauccuuuagcaccgccgaucagcuggagauggugacagagcuccugggcggggacauggucaaucagucuuucauuugcgauccugacgaugaaaccuuuaucaagaacauuaucauucaagacuguaugugguccggauucagcgcggcugccaaacuggugucugagaagcucgccuccuaccaggcugcccggaaagauagcggcucucccaauccugcucgcggccacuccguuugcagcacauccucucuguaucuucaggaccugagcgccgcggccuccgaauguaucgaccccagcguggucuuuccguacccucucaacgauucuuccagccccaagucuugcgcuagccaggacuccucugccuucagcccuuccagcgauucucugcuuuccagcaccgagucuagcccccaagggagccccgagccucuggugcuccaugaagagacaccgcccaccacguccucugacagcgaagaggaacaggaggaugaggaagagaucgacguuguguccgucgaaaagagacaggcuccuggaaaacggucugagagcggcucccccagcgccgggggacacucuaagccuccccauuccccgcuggugcugaaacgcugucacgugagcacccaucaacacaauuacgcggccccucccucuacaagaaaggauuauccugcugccaaacgggucaagcucgacuccguucgcgugcugagacagauuagcaacaaucggaagugcaccucuccccgcagcuccgauacagaagagaacgugaaaagacggacccacaauguccuugagcgccagagacggaacgaacugaagagauccuuuuucgcucuccgcgaccagaucccugagcuggaaaauaacgagaaagcccccaaggugguuauucuuaaaaaggccacggcuuacauccugucugugcaagcggaggaacagaaacucauuuccgaggaagaucugcugcggaagagacgcgagcagcucaagcauaaacuggaacagcuucggaacagcugugccuga

SEQ ID NO: 9866 - RNA, 1320 nt, Artificial Sequence
  derived and/or modified sequence opt6 from c-myc__Homo_sapiens__AAA36340
augccauuaaacgucucuuucacaaacagaaauuacgaccuagacuacgauucaguacaaccauauuuuuacugcgacgaagaagaaaacuucuaucaacaacaacaacaaucagaacuccaaccaccagcucccucugaagacaucuggaaaaaauucgaacuauuaccaacaccaccauuaucuccuucacgaagaucaggucuaugcucaccaucauacguagccguuaccccauucucauuacguggcgauaacgauggaggcggaggaucauucucaacagcugaucaauuagaaauggucacagaacuacucggaggugauaugguuaaucaaagcuucauuugugauccagaugacgaaacauucauaaaaaacauuauaauacaagauugcauguggucaggauucucagcagcagcaaaauuaguaucagaaaaacuagcuucauaucaagcagcaagaaaagauuccggcucaccaaaccccgcacgaggacauucaguaugcagcaccucaucauuauacuuacaagaccucucagcugcagcaucagaaugcauagacccauccguaguauuuccauacccacuuaacgauucuucaucaccaaaaucaugcgcaucccaagauucaagugcauucucaccgucaucagacucauuacucucauccacagaaucuagcccucaaggaucaccagaaccauuaguauuacaugaagaaacaccaccaacaacaucaucagacuccgaagaagaacaagaagacgaagaagaaauugacguaguuucaguagaaaaaagacaagcacccggaaaacgaucagaaucagguucacccucagcaggaggccacagcaaaccaccacacucaccacuaguauuaaaaagaugccacguaucaacacaccaacacaacuacgcagcaccaccaucaacaagaaaagauuacccugcagcaaaaagagucaaacuagacucagucagaguauuacgccaaauaucaaauaauagaaaaugcacaucaccaagaucauccgacacagaagaaaacguaaaacgacgaacacauaacguacuagaaagacaaagaagaaacgaacuaaaacgauccuucuucgcauuacgagaccaaauccccgaacuagaaaacaacgaaaaagcaccaaaaguaguuauucuaaaaaaagcaacagcuuacauacucucaguacaagccgaagaacaaaaauuaaucucugaagaagaucuacucagaaaaagacgcgaacaacuaaaacacaaacuagaacaacuaagaaauucaugcgcauaa

SEQ ID NO: 9867 - protein, 188 aa, Artificial Sequence [sequence omitted]

SEQ ID NO: 9868 - RNA, 567 nt, Artificial Sequence
  c-myc__Homo_sapiens__AAA59886
augcgagggucuggacggcugaggacccccgagcuggucugcucgcggccgccaccgccgggccccggccgucccuggcuccccuccugccucgagaagggcagggcuucucagaggcuuggcgggaaaaagaacggagggagggaucgcgcugaguauaaaagccgguuuucggggcuuuaucuaacucgcuguaguaauuccagcgagaggcagagggagcgagcgggcggccggcuaggguggaagagccgggcgagcagagcugcgcugcgggcguccugggaagggagauccggagcgaauagggggcuucgccucuggcccagcccucccgcugaucccccagccagccguccgcaacccuugccgcauccacgaaacuuugcccauagcagcgggcgggcacuuugcacuggaacuuacaacacccgagcaaggacgcgacucucccgacgcggggaggcuauucugcccauuuggggacacuuccccgccgcugccaggacccgcuucucugaaaggcucuccuugcagcugcuuagacgcuggauuuuuuucggguag

SEQ ID NO: 9869 - RNA, 567 nt, Artificial Sequence
  derived and/or modified sequence opt1 from c-myc__Homo_sapiens__AAA59886
augcgcggcagcgggcggcugcgcacccccgagcucgugugcucccggccgcccccgcccggccccgggcgccccuggcugcccagcugccuggagaagggccgggccucccagcgccucgggggcaagaagaacggcgggcgggaccgcgccgaguacaagagccgguucuccggccuguaccugacccgcugcagcaacuccagcgagcggcagcgcgagcgggccgggggccgccucggguggaagucccgggcgagccgcgccgcccugcgggccuccugggagggccgcagcggcgcgaaccgggggcugcgccucuggcccuccccgcccgccgacccgcccgccagccggccccagccccugccccacccccgcaacuucgcccacuccagcggccgcgcgcugugcacggggaccuacaacacccgggcccgcacccggcucucccgccggggcgaggccauccugccgaucuggggccacuuccccgccgccgcgcgcacgcgguucagcgagcgccugucccuccagcugcugcggcgcuggaucuucuucggguga

SEQ ID NO: 9870 - RNA, 567 nt, Artificial Sequence
  derived and/or modified sequence opt2 from c-myc__Homo_sapiens__AAA59886
augcgcggcuccggccgccuccgcacccccgagcucgucugcucccgcccccccccccccggccccggccgccccuggcuccccuccugccucgagaagggccgcgccucccagcgccucggcggcaagaagaacggcggccgcgaccgcgccgaguacaagucccgcuucuccggccucuaccucacccgcugcuccaacuccuccgagcgccagcgcgagcgcgccggcggccgccucggcuggaagucccgcgccucccgcgccgcccuccgcgccuccugggagggccgcuccggcgccaaccgcggccuccgccucuggcccuccccccccgccgacccccccgccucccgcccccagccccucccccacccccgcaacuucgcccacuccuccggccgcgcccucugcaccggcaccuacaacacccgcgcccgcacccgccucucccgccgcggcgaggccauccuccccaucuggggccacuuccccgccgccgcccgcacccgcuucuccgagcgccucucccuccagcuccuccgccgcuggaucuucuucggcuga

SEQ ID NO: 9871 - RNA, 567 nt, Artificial Sequence
  derived and/or modified sequence opt3 from c-myc__Homo_sapiens__AAA59886
augagaggcagcgggaggcugcggacccccgagcucgugugcucccgcccuccaccgcccggaccuggucgaccauggcuucccucuugucuggaaaagggccgugccucacagagauugggagggaaaaagaacggcgguagggaccgggcugaguacaaaagucgcuucagcggguuauaucugacaagaugcuccaauucuucggaaaggcaacgggagcgcgcaggaggccgacuaggcuggaagucaagagccagcagggcggcucuccgggccaguugggaagggcguuccggagcaaaccgcggucugagacuuuggccuucuccacccgccgauccuccagcuagcaggccgcagccccugccucacccacggaauuuugcacauuccucaggccgagccuuguguacugggacguacaacacccgcgcuagaacaaggcucagucggcgcggagaggccauccugcccauuuggggccacuucccugcggcagccagaacuagguuuagcgagcgucugucucuccaguuacugcggcgauggauauucuuugguuga

SEQ ID NO: 9872 - RNA, 567 nt, Artificial Sequence
  derived and/or modified sequence opt4 from c-myc__Homo_sapiens__AAA59886
augagaggcagcggcagacugagaacccccgagcuggugugcagcagaccccccccccccggccccggcagacccuggcugcccagcugccuggagaagggcagagccagccagagacugggcggcaagaagaacggcggcagagacagagccgaguacaagagcagauucagcggccuguaccugaccagaugcagcaacagcagcgagagacagagagagagagccggcggcagacugggcuggaagagcagagccagcagagccgcccugagagccagcugggagggcagaagcggcgccaacagaggccugagacuguggcccagcccccccgccgacccccccgccagcagaccccagccccugccccaccccagaaacuucgcccacagcagcggcagagcccugugcaccggcaccuacaacaccagagccagaaccagacugagcagaagaggcgaggccauccugcccaucuggggccacuuccccgccgccgccagaaccagauucagcgagagacugagccugcagcugcugagaagauggaucuucuucggcuga

SEQ ID NO: 9873 - RNA, 567 nt, Artificial Sequence
  derived and/or modified sequence opt5 from c-myc__Homo_sapiens__AAA59886
augagaggcagcgggcggcugcgcacccccgagcucgugugcuccagaccuccgcccccuggacccggccggccuuggcugcccucuugucuugaaaaggggcgcgccagccagagacugggaggcaagaagaacgggggacgggaccgcgcugaguacaaauccagauucucuggccucuaucugacacggugcagcaauuccucugaacgccaaagagagcgggccggcgggcgccuuggauggaaaagcagagcgucccgggcugcccugcgcgccagcugggaaggcagaucuggggcuaaccggggacucagacuguggccuuccccgcccgccgauccucccgcuagccgcccucagccccugccgcacccucggaauuuugcccauucuuccggcagagcgcucuguacggggaccuacaacacacgcgcccggaccagacugagccgccggggagaggcuauccuucccauuuggggccacuucccugccgcugccagaacacgcuuuucugagcggcugucccuccagcugcuuagacgcuggaucuucuuuggcuga

SEQ ID NO: 9874 - RNA, 567 nt, Artificial Sequence
  derived and/or modified sequence opt6 from c-myc__Homo_sapiens__AAA59886
augagagguaguggaagauuaagaacaccagaauuaguauguagcagaccaccaccaccaggaccaggaagaccaugguuaccaagcuguuuagaaaaaggaagagcaagccagagacuaggaggaaaaaaaaauggaggaagagauagagcugaauauaaaaguagauuuucaggacuauauuuaacaagauguaguaacaguucagaaagacaaagagaaagagcaggaggaagauuaggauggaaaucaagagcaucaagggcagcauuaagagcaucaugggaaggaaggaguggagcaaaucgaggauuaagauuauggccaucaccaccagcagauccaccagcuaguagaccacaaccgcuaccacauccaagaaauuuugcacauucaagcggaagagcacuauguacuggaacauauaauacaagagcaagaacaagauuaaguagaagaggagaagcaauacuaccaauauggggacauuuuccagcagcagcaaggacacgauuuagugaaagauuaaguuuacaacuauuaagaagauggauauuuuuuggauaa

SEQ ID NO: 9875 - protein, 188 aa, Artificial Sequence
  c-myc__Homo_sapiens__Q16591
MRGSGRLRTPELCCSRPPPPGPGRPWLPSCLEKGRASQRLGGKKNGGRDRAEYKSRFSGLYLTRCSNSSERQRERAGGRLGWKSRASRAALRASWEGRSGANRGLRLWPSPPADPPASGPQPLPHPRNFAHSSGRALCTGTYNTRARTRLSRRGEAILPIWGHFPAAARTRFSERLSLQLLRRWIFFG

SEQ ID NO: 9876 - RNA, 567 nt, Artificial Sequence
  c-myc__Homo_sapiens__AAA59887
augcgagggucuggacggcugaggacccccgagcugugcugcucgcggccgccaccgccgggccccggccgucccuggcuccccuccugccucgagaagggcagggcuucucagaggcuuggcgggaaaaagaacggagggagggaucgcgcugaguauaaaagccgguuuucggggcuuuaucuaacucgcuguaguaauuccagcgagaggcagagggagcgagcgggcggccggcuaggguggaagagccgggcgagcagagcugcgcugcgggcguccugggaagggagauccggagcgaauagggggcuucgccucuggcccagcccucccgcugaucccccagccagcgguccgcaacccuugccgcauccacgaaacuuugcccauagcagcgggcgggcacuuugcacuggaacuuacaacacccgagcaaggacgcgacucucccgacgcggggaggcuauucugcccauuuggggacacuuccccgccgcugccaggacccgcuucucugaaaggcucuccuugcagcugcuuagacgcuggauuuuuuucggguag

SEQ ID NO: 9877 - RNA, 567 nt, Artificial Sequence
  derived and/or modified sequence opt1 from c-myc__Homo_sapiens__AAA59887
augcgcggcagcgggcggcugcgcacccccgagcucugcugcucccggccgcccccgcccggccccgggcgccccuggcugcccagcugccuggagaagggccgggccucccagcgccucgggggcaagaagaacggcgggcgggaccgcgccgaguacaagagccgguucuccggccuguaccugacccgcugcagcaacuccagcgagcggcagcgcgagcgggccgggggccgccucggguggaagucccgggcgagccgcgccgcccugcgggccuccugggagggccgcagcggcgcgaaccgggggcugcgccucuggcccuccccgcccgccgacccgcccgccagcggcccccagccccugccccacccccggaacuucgcccacuccagcgggcgcgcgcugugcacgggcaccuacaacacccgcgcccggacccgccucucccggcgcggcgaggccauccugccgaucugggggcacuuccccgccgccgcgcggacgcgcuucagcgagcggcugucccuccagcugcugcgccgguggaucuucuucggcuga

SEQ ID NO: 9878 - RNA, 567 nt, Artificial Sequence
  derived and/or modified sequence opt2 from c-myc__Homo_sapiens__AAA59887
augcgcggcuccggccgccuccgcacccccgagcucugcugcucccgcccccccccccccggccccggccgccccuggcuccccuccugccucgagaagggccgcgccucccagcgccucggcggcaagaagaacggcggccgcgaccgcgccgaguacaagucccgcuucuccggccucuaccucacccgcugcuccaacuccuccgagcgccagcgcgagcgcgccggcggccgccucggcuggaagucccgcgccucccgcgccgcccuccgcgccuccugggagggccgcuccggcgccaaccgcggccuccgccucuggcccuccccccccgccgacccccccgccuccggcccccagccccucccccacccccgcaacuucgcccacuccuccggccgcgcccucugcaccggcaccuacaacacccgcgcccgcacccgccucucccgccgcggcgaggccauccuccccaucuggggccacuuccccgccgccgcccgcacccgcuucuccgagcgccucucccuccagcuccuccgccgcuggaucuucuucggcuga

SEQ ID NO: 9879 - RNA, 567 nt, Artificial Sequence
  derived and/or modified sequence opt3 from c-myc__Homo_sapiens__AAA59887
augagaggcagcgggaggcugcggacccccgagcucugcuguucccgcccuccaccgcccggaccuggucgaccauggcuucccucuugccuggaaaagggccgugccucacagagauugggagggaaaaagaacggcgguagggaccgggcugaguacaaaagucgcuucagcggguuauaucugacaagauguuccaauucuucggaaaggcaacgggagcgcgcaggaggccgacuaggcuggaagucaagagccagcagggcggcucuccgggccaguugggaagggcguuccggagcaaaccgcggucugagacuuuggccuucuccacccgccgauccuccagcuagcggcccgcagccccugccucacccaaggaauuuugcacauuccucagggcgggccuugugcacuggaacguacaacacccgagcucgcacaagacucaguaggcggggcgaggccauccugcccauuuggggucacuucccugcggcagcccgcacuagauuuagcgagaggcugucucuccaguuacugcgucgguggauauucuuuggguga

SEQ ID NO: 9880 - RNA, 567 nt, Artificial Sequence
  derived and/or modified sequence opt4 from c-myc__Homo_sapiens__AAA59887
augagaggcagcggcagacugagaacccccgagcugugcugcagcagaccccccccccccggccccggcagacccuggcugcccagcugccuggagaagggcagagccagccagagacugggcggcaagaagaacggcggcagagacagagccgaguacaagagcagauucagcggccuguaccugaccagaugcagcaacagcagcgagagacagagagagagagccggcggcagacugggcuggaagagcagagccagcagagccgcccugagagccagcugggagggcagaagcggcgccaacagaggccugagacuguggcccagcccccccgccgacccccccgccagcggcccccagccccugccccaccccagaaacuucgcccacagcagcggcagagcccugugcaccggcaccuacaacaccagagccagaaccagacugagcagaagaggcgaggccauccugcccaucuggggccacuuccccgccgccgccagaaccagauucagcgagagacugagccugcagcugcugagaagauggaucuucuucggcuga

SEQ ID NO: 9881 - RNA, 567 nt, Artificial Sequence
  derived and/or modified sequence opt5 from c-myc__Homo_sapiens__AAA59887
augagaggcagcgggcggcugcgcacccccgagcucugcuguuccagaccuccgcccccuggacccggccggccuuggcugcccucuugccuugaaaaggggcgcgccagccagagacugggaggcaagaagaacgggggacgggaccgcgcugaguacaaauccagauucucuggccucuaucugacacgguguagcaauuccucugaacgccaaagagagcgggccggcgggcgccuuggauggaaaagcagagcgucccgggcugcccugcgcgccagcugggaaggcagaucuggggcuaaccggggacucagacuguggccuuccccgcccgccgauccucccgcuagcggcccucagccccugccgcacccucgcaauuuugcccauucuuccgggcgggcgcucugcacgggaaccuacaacacaagagcccgcacccggcugagcagacgcggcgaggcuauccuucccauuuggggccacuucccugccgcugcccggacaagauuuucugagcgccugucccuccagcugcuucggagauggaucuucuuuggguga

SEQ ID NO: 9882 - RNA, 567 nt, Artificial Sequence
  derived and/or modified sequence opt6 from c-myc__Homo_sapiens__AAA59887
augagaggaucaggaagacuaagaacaccagaauuaugcuguaguagaccaccaccaccaggaccaggaagaccaugguuaccaaguuguuuagaaaaaggaagagcgagucaaagauuaggaggaaaaaaaaauggaggaagagacagagcagaauauaaaagcagauuuucagguuuauauuuaacaagauguucaaauucaagugaaagacaaagagaaagagcaggaggaagacuaggauggaaaucaagagcaaguagagcagcauuaagagcaucgugggaaggaagaaguggagcaaauagaggauuaagauuauggccaucaccaccagcggauccaccagcaucaggaccacaaccauuaccacauccaagaaauuuugcacauaguaguggaagagcauuauguacaggaacauauaauacaagagcgagaacaagauuaagcagaagaggagaagcaauauuaccuauauggggacacuuuccagcagcagcaagaacaagauuuagugaaagacuaaguuuacaauuauuaagaagauggauauuuuuugguuaa

SEQ ID NO: 9883 - protein, 353 aa, Artificial Sequence
  Klf1__Homo_sapiens__K7VKE0
MATAETALPSISTLTALGPFPDTQDDFLKWWRSEEAQDMGPGPPDPTEPPLHVKSEDQPGEEEDDERGADATWDLDLLLTNFSGPEPGGAPQTCALAPSEASGAQYPPPPETLGAYAGGPGLVAGLLGSEDHSGWVRPALRARAPDAFVGPALAPAPAPEPKALALQPVYPGPGARRRLLGWLLPADRAFSACGVGRPLRATVRVPRDVPGASVPRALPALPRAPGTRARSRHVPLLPELFGTRDGGHWTRGDCRGSRCDSRDRAIQARPTFVGAQEAGSAHVRAPGLRQELHQELPPEGASAHAHRGEAIRLHVGRLRLEIRALGRADPPLPETHGAAPLPLPALPTCFFAL

SEQ ID NO: 9884 - RNA, 1062 nt, Artificial Sequence
  Klf1__Homo_sapiens__AFW90650
auggccacagccgagaccgccuugcccuccaucagcacacugaccgcccugggccccuucccggacacacaggaugacuuccucaagugguggcgcuccgaagaggcgcaggacaugggcccggguccuccugaccccacggagccgccccuccacgugaagucugaggaccagcccggggaggaagaggacgaugagaggggcgcggacgccaccugggaccuggaucuccuccucaccaacuucucgggcccggagcccgguggcgcgccccagaccugcgcucuggcgcccagcgaggccuccggggcgcaauauccgccgccgcccgagacucugggcgcauaugcuggcggcccggggcugguggcugggcuuuuggguucggaggaucacucggguugggugcgcccugcccugcgagcccgggcucccgacgccuucgugggcccagcccuggcuccagccccggcccccgagcccaaggcgcuggcgcugcaaccgguguacccggggcccggcgcccggcgccggcuccucggguggcuacuucccgcggaccgggcuuucagugccugcggcgucgggcgcccccuacgggcuacuguccggguaccccgcgauguacccggcgccucaguaccaagggcacuuccagcucuuccgcgggcuccagggacccgcgcccggucccgccacgucccccuccuuccugaguuguuugggacccgggacggugggcacuggacucggggggacugcagaggauccaggugugauagccgagaccgcgccauccaagcgaggccgacguucgugggcgcgcaagaggcaggcagcgcacacgugcgcgcacccggguugcggcaagagcuacaccaagagcucccaccugaaggcgcaucugcgcacgcacacaggggagaagccauacgccugcacgugggaaggcugcggcuggagauucgcgcgcucggacgagcugacccgccacuaccggaaacacacggggcagcgccccuuccgcugccagcucugcccacgugcuuuuucgcgcucuga

SEQ ID NO: 9885 - RNA, 1062 nt, Artificial Sequence
  derived and/or modified sequence opt1 from Klf1__Homo_sapiens__AFW90650
auggccaccgccgagaccgcgcugcccagcaucuccacgcucaccgcccugggccccuuccccgacacccaggacgacuuccugaagugguggcgcagcgaggaggcccaggacauggggcccgggcccccggaccccaccgagccgccccuccacgugaaguccgaggaccagcccggggaggaggaggacgacgagcggggcgccgacgccacgugggaccuggaccugcuccugaccaacuucagcgggcccgagcccggcggcgcgccccagaccugcgcccuggccccguccgaggccagcggggcgcaguacccgcccccgcccgagacccucggcgccuacgccgggggccccgggcuggucgccggccugcucggcuccgaggaccacagcgggugggugcgccccgcccugcgggcgcgcgcccccgacgccuucgugggccccgcccuggcccccgcgcccgcccccgagccgaaggcccucgcccugcagcccgucuaccccgggcccggcgcccggcgccggcugcucggcuggcugcugccggcggaccgcgccuucuccgccugcggggugggccggccccuccgcgccacggugcgggucccccgcgacgugccgggggccagcgugccccgggcgcugcccgcccugccccgcgccccgggcacccgggcccgcucccggcacgucccccuccugcccgagcuguucgggacccgcgacggcggccacuggacccggggcgacugccgcggcagccggugcgacucccgcgaccgcgcgauccaggcccggcccacguucgugggggcccaggaggccggcagcgcccacgugcgcgcgccggggcuccggcaggagcugcaccaggagcugccgcccgagggcgccuccgcccacgcccaccgcggcgaggccauccggcuccacgucgggcgccugcggcuggagauccgcgcgcucggccgggccgacccgccccugcccgagacccacggggccgcgccccugccccuccccgcccugccgaccugcuucuucgcccuguga

SEQ ID NO: 9886 - RNA, 1062 nt, Artificial Sequence
  derived and/or modified sequence opt2 from Klf1__Homo_sapiens__AFW90650
auggccaccgccgagaccgcccuccccuccaucuccacccucaccgcccucggccccuuccccgacacccaggacgacuuccucaagugguggcgcuccgaggaggcccaggacaugggccccggcccccccgaccccaccgagcccccccuccacgucaaguccgaggaccagcccggcgaggaggaggacgacgagcgcggcgccgacgccaccugggaccucgaccuccuccucaccaacuucuccggccccgagcccggcggcgccccccagaccugcgcccucgcccccuccgaggccuccggcgcccaguacccccccccccccgagacccucggcgccuacgccggcggccccggccucgucgccggccuccucggcuccgaggaccacuccggcuggguccgccccgcccuccgcgcccgcgcccccgacgccuucgucggccccgcccucgcccccgcccccgcccccgagcccaaggcccucgcccuccagcccgucuaccccggccccggcgcccgccgccgccuccucggcuggcuccuccccgccgaccgcgccuucuccgccugcggcgucggccgcccccuccgcgccaccguccgcgucccccgcgacguccccggcgccuccgucccccgcgcccuccccgcccucccccgcgcccccggcacccgcgcccgcucccgccacgucccccuccuccccgagcucuucggcacccgcgacggcggccacuggacccgcggcgacugccgcggcucccgcugcgacucccgcgaccgcgccauccaggcccgccccaccuucgucggcgcccaggaggccggcuccgcccacguccgcgcccccggccuccgccaggagcuccaccaggagcucccccccgagggcgccuccgcccacgcccaccgcggcgaggccauccgccuccacgucggccgccuccgccucgagauccgcgcccucggccgcgccgaccccccccuccccgagacccacggcgccgccccccucccccuccccgcccuccccaccugcuucuucgcccucuga

SEQ ID NO: 9887 - RNA, 1062 nt, Artificial Sequence
  derived and/or modified sequence opt3 from Klf1__Homo_sapiens__AFW90650
auggccaccgcugagacagcacugcccagcaucuccacucucacggcccuuggcccuuucccagacacccaggaugacuuucugaagugguggagaucugaagaggcgcaagauauggggccgggacccccugacccaacagaacccccuuugcacgugaaaucagaggaucagccaggugaagaggaggacgaugaaaggggcgcugacgccacuugggauuuagaccugcuacucaccaacuucagugggcccgagccuggaggcgcaccacagacaugcgcccuggcuccgagcgaagcauccggugcccaguaucccccuccacccgagacccuuggggcuuacgccggaggcccuggccuggucgcgggguugcucggaucugaggaucauucggguuggguucggccagcacugcgcgcccgagcucccgacgccuuugugggcccggcacuggcuccugcccccgcgccagaaccuaaggcccucgcauuacaacccguauacccagggcccggagcucguagaaggcugcuuggcugguugcugccugccgaucgggcuuucucagccugugguguggggcgcccacuaagagcaacugucagggugccgcgggacguucccggagccagcgugccucgcgcucucccagcgcugccccgagcaccuggcacaagagccaggagucggcacgucccacuucugcccgaguuguuuggcacccgugacgggggacauuggacgcgcggugauugcagaggcuccaggugugacucucgggaucgagcuauucaggcccgcccgacuuucgugggggcacaggaagccggaagcgcucacguaagagccccuggccucaggcaggagcugcaucaagaauuaccacccgagggugcauccgcgcacgcucaccgcggggaggccauacggcugcauguuggcagacucaggcuugaaauccgugcacugggacgggccgacccucccuugccagagacccacggcgcugccccucuaccccugccagcacucccgacaugcuuuuucgcucuguga

SEQ ID NO: 9888 - RNA, 1062 nt, Artificial Sequence
  derived and/or modified sequence opt4 from Klf1__Homo_sapiens__AFW90650
auggccaccgccgagaccgcccugcccagcaucagcacccugaccgcccugggccccuuccccgacacccaggacgacuuccugaagugguggagaagcgaggaggcccaggacaugggccccggcccccccgaccccaccgagcccccccugcacgugaagagcgaggaccagcccggcgaggaggaggacgacgagagaggcgccgacgccaccugggaccuggaccugcugcugaccaacuucagcggccccgagcccggcggcgccccccagaccugcgcccuggcccccagcgaggccagcggcgcccaguacccccccccccccgagacccugggcgccuacgccggcggccccggccugguggccggccugcugggcagcgaggaccacagcggcugggugagacccgcccugagagccagagcccccgacgccuucgugggccccgcccuggcccccgcccccgcccccgagcccaaggcccuggcccugcagcccguguaccccggccccggcgccagaagaagacugcugggcuggcugcugcccgccgacagagccuucagcgccugcggcgugggcagaccccugagagccaccgugagagugcccagagacgugcccggcgccagcgugcccagagcccugcccgcccugcccagagcccccggcaccagagccagaagcagacacgugccccugcugcccgagcuguucggcaccagagacggcggccacuggaccagaggcgacugcagaggcagcagaugcgacagcagagacagagccauccaggccagacccaccuucgugggcgcccaggaggccggcagcgcccacgugagagcccccggccugagacaggagcugcaccaggagcugccccccgagggcgccagcgcccacgcccacagaggcgaggccaucagacugcacgugggcagacugagacuggagaucagagcccugggcagagccgaccccccccugcccgagacccacggcgccgccccccugccccugcccgcccugcccaccugcuucuucgcccuguga

SEQ ID NO: 9889 - RNA, 1062 nt, Artificial Sequence
  derived and/or modified sequence opt5 from Klf1__Homo_sapiens__AFW90650
auggccaccgcugagacagcccugcccagcaucuccacgcucaccgcgcugggcccuuucccggacacacaggacgacuuucuuaagugguggagaucugaagaggcucaagauauggggcccggaccucccgacccuaccgaacccccucugcacgugaaaagcgaggaucagccgggcgaagaggaggacgaugaacggggagccgacgccacaugggaucucgaccugcuucugaccaacuucuccggacccgagccuggcggggcuccccagacaugcgcccucgcuccuucugaagccagcggagcgcaguaucccccgccucccgagacccugggcgccuacgcuggcgggccuggacuggucgccggccuccugggguccgaggaucauucuggauggguucgccccgcucuuagagcccgggcgcccgacgccuuugugggcccugcucuggccccggcucccgccccugaacccaaggcccucgcucugcaaccuguguaccccgggccgggagcgcgcagacggcuucugggcuggcuccugccugccgaucgcgcuuucagcgccuguggcgucgggagaccccugcgggccacggugcgcguuccuagagacgugcccggagcuuccgucccucgggcccuccccgcgcugccgcgcgcuccuggcaccagagcccggagccgccacgugccccuucugcccgagcucuuugggacaagagacggaggccauuggaccagaggggauugccggggaucucgcugugacucccgggauagagccauucaggcucgcccuacauucguuggcgcccaggaagcuggcagcgcccacgugcgggcgccggggcugagacaggagcuucaucaagaacugcccccugagggagccucugcucacgcccaccgcggcgaggcuauccggcuccaugucgggagacugcgccuggaaauucgggcccucgggagagcggaucccccucugcccgagacccacggcgccgcuccucuuccccugccggcccucccuacgugcuuuuucgcucuguga

SEQ ID NO: 9890 - RNA, 1062 nt, Artificial Sequence
  derived and/or modified sequence opt6 from Klf1__Homo_sapiens__AFW90650
auggcaacagcugaaacugcacuaccaucuauauccacuuuaacagcauuaggaccauucccagacacacaagaugauuuuuuaaaaugguggagaucagaagaagcacaagauaugggaccuggaccacccgaucccacagaaccuccucuacauguaaaaucagaagaccaaccaggagaagaagaagaugacgaaagaggagcagacgcaacaugggauuuagacuuauuacuaacuaauuucucaggaccagaaccagguggugcaccacaaacaugugcauuggcaccaucagaagcaucaggagcacaauacccaccaccaccagaaacacuaggagcauacgcuggaggaccuggauuaguagcuggauuguuaggaucagaagaccauucaggauggguuagacccgcacuuagagcucgagcaccagaugccuuuguaggaccugcacuugcaccagcaccagcaccugaaccaaaagcacuagcauuacaaccaguguauccaggaccaggagcaagaagacgauuauuaggaugguuauuaccagcagauagagcauuuucagcauguggagugggaaggccuuuaagagcuacuguaagaguaccaagagacguaccaggagcaucaguaccaagagcauuaccagcauuaccuagagcaccuggcacaagagcaagaagucgucauguaccauuauuaccagaauuauuugguacaagagaugguggacacuggacaagaggagauuguagaggauccagaugugauucacgagauagagcgauccaagcaagaccuacauuuguaggugcacaagaagcuggaagcgcgcauguaagagcacccgguuuaagacaagaauuacaucaagaauuaccaccagaaggagcaucagcacaugcacauagaggugaagcaauaagauuacauguaggaagauuacgauuagaaauaagagcacuagguagagcugacccuccauuaccagaaacacauggggcagcaccuuuaccacuaccagcacuaccaacuuguuuuuuugcacuuuaa

SEQ ID NO: 9891 - protein, 362 aa, Artificial Sequence
  Klf1__Homo_sapiens__Q13351
MATAETALPSISTLTALGPFPDTQDDFLKWWRSEEAQDMGPGPPDPTEPPLHVKSEDQPGEEEDDERGADATWDLDLLLTNFSGPEPGGAPQTCALAPSEASGAQYPPPPETLGAYAGGPGLVAGLLGSEDHSGWVRPALRARAPDAFVGPALAPAPAPEPKALALQPVYPGPGAGSSGGYFPRTGLSVPAASGAPYGLLSGYPAMYPAPQYQGHFQLFRGLQGPAPGPATSPSFLSCLGPGTVGTGLGGTAEDPGVIAETAPSKRGRRSWARKRQAAHTCAHPGCGKSYTKSSHLKAHLRTHTGEKPYACTWEGCGWRFARSDELTRHYRKHTGQRPFRCQLCPRAFSRSDHLALHMKRHL

SEQ ID NO: 9892 - RNA, 1089 nt, Artificial Sequence
  Klf1__Homo_sapiens__AAB51173
auggccacagccgagaccgccuugcccuccaucagcacacugaccgcccugggccccuucccggacacacaggaugacuuccucaagugguggcgcuccgaagaggcgcaggacaugggcccggguccuccugaccccacggagccgccccuccacgugaagucugaggaccagcccggggaggaagaggacgaugagaggggcgcggacgccaccugggaccuggaucuccuccucaccaacuucucgggcccggagcccgguggcgcgccccagaccugcgcucuggcgcccagcgaggccuccggggcgcaauauccgccgccgcccgagacucugggcgcauaugcuggcggcccggggcugguggcugggcuuuuggguucggaggaucacucggguugggugcgcccugcccugcgagcccgggcucccgacgccuucgugggcccagcccuggcuccagccccggcccccgagcccaaggcgcuggcgcugcaaccgguguacccggggcccggcgccggcuccucggguggcuacuucccgcggaccgggcuuucagugccugcggcgucgggcgcccccuacgggcuacuguccggguaccccgcgauguacccggcgccucaguaccaagggcacuuccagcucuuccgcgggcuccagggacccgcgcccggucccgccacgucccccuccuuccugaguuguuugggacccgggacggugggcacuggacucggggggacugcagaggauccaggugugauagccgagaccgcgccauccaagcgaggccgacguucgugggcgcgcaagaggcaggcagcgcacacgugcgcgcacccggguugcggcaagagcuacaccaagagcucccaccugaaggcgcaucugcgcacgcacacaggggagaagccauacgccugcacgugggaaggcugcggcuggagauucgcgcgcucggacgagcugacccgccacuaccggaaacacacggggcagcgccccuuccgcugccagcucugcccacgugcuuuuucgcgcucugaccaccuggccuugcacaugaagcgccaccuuuga

SEQ ID NO: 9893 - RNA, 1089 nt, Artificial Sequence
  derived and/or modified sequence opt1 from Klf1__Homo_sapiens__AAB51173
auggccaccgccgagaccgcgcugcccagcaucuccacgcucaccgcccugggcccguuccccgacacccaggacgacuuccugaagugguggcgcagcgaggaggcccaggacauggggcccgggcccccggaccccaccgagccgccccuccacgugaaguccgaggaccagcccggcgaggaggaggacgacgagcggggcgccgacgccacgugggaccuggaccugcuccugaccaacuucagcgggcccgagcccggcggcgcgccccagaccugcgcccuggccccguccgaggccagcggggcgcaguacccgcccccgcccgagacccucggcgccuacgccgggggccccgggcuggucgccggccugcucggcuccgaggaccacagcgggugggugcgccccgcccugcgggcgcgcgcccccgacgccuucgugggccccgcccuggcccccgcgcccgcccccgagccgaaggcccucgcccugcagcccgucuaccccgggcccggcgccggcuccagcgggggcuacuucccgcggacggggcuguccgugcccgcggccagcggcgcccccuacgggcuccuguccggcuacccggccauguaccccgcgccccaguaccagggccacuuccagcuguuccgcgggcuccagggccccgccccggggcccgccaccagccccuccuuccugagcugccugggccccgggaccgugggcaccggccucgggggcacggccgaggacccgggggucaucgccgagaccgcgcccuccaagcggggccgccggagcugggcccgcaagcggcaggccgcccacacgugcgcccaccccgggugcggcaaguccuacaccaagagcagccaccugaaggcgcaccuccgcacccacaccggcgagaagcccuacgccugcaccugggaggggugcggcuggcgguucgcccgcuccgacgagcugacccggcacuaccgcaagcacacggggcagcggccguuccgcugccagcugugcccccgggccuucagccgcuccgaccaccuggcccuccacaugaagcggcaccuguga

SEQ ID NO: 9894 - RNA, 1089 nt, Artificial Sequence
  derived and/or modified sequence opt2 from Klf1__Homo_sapiens__AAB51173
auggccaccgccgagaccgcccuccccuccaucuccacccucaccgcccucggccccuuccccgacacccaggacgacuuccucaagugguggcgcuccgaggaggcccaggacaugggccccggcccccccgaccccaccgagcccccccuccacgucaaguccgaggaccagcccggcgaggaggaggacgacgagcgcggcgccgacgccaccugggaccucgaccuccuccucaccaacuucuccggccccgagcccggcggcgccccccagaccugcgcccucgcccccuccgaggccuccggcgcccaguacccccccccccccgagacccucggcgccuacgccggcggccccggccucgucgccggccuccucggcuccgaggaccacuccggcuggguccgccccgcccuccgcgcccgcgcccccgacgccuucgucggccccgcccucgcccccgcccccgcccccgagcccaaggcccucgcccuccagcccgucuaccccggccccggcgccggcuccuccggcggcuacuucccccgcaccggccucuccguccccgccgccuccggcgcccccuacggccuccucuccggcuaccccgccauguaccccgccccccaguaccagggccacuuccagcucuuccgcggccuccagggccccgcccccggccccgccaccucccccuccuuccucuccugccucggccccggcaccgucggcaccggccucggcggcaccgccgaggaccccggcgucaucgccgagaccgcccccuccaagcgcggccgccgcuccugggcccgcaagcgccaggccgcccacaccugcgcccaccccggcugcggcaaguccuacaccaaguccucccaccucaaggcccaccuccgcacccacaccggcgagaagcccuacgccugcaccugggagggcugcggcuggcgcuucgcccgcuccgacgagcucacccgccacuaccgcaagcacaccggccagcgccccuuccgcugccagcucugcccccgcgccuucucccgcuccgaccaccucgcccuccacaugaagcgccaccucuga

SEQ ID NO: 9895 - RNA, 1089 nt, Artificial Sequence
  derived and/or modified sequence opt3 from Klf1__Homo_sapiens__AAB51173
auggccaccgcugagacagcacugcccagcaucuccacucucacggcccuuggcccuuucccagacacccaggaugacuuucugaagugguggagaucugaagaggcgcaagauauggggccgggacccccugacccaacagaacccccuuugcacgugaaaucagaggaucagccaggugaagaggaggacgaugaaaggggcgcugacgccacuugggauuuagaccugcuacucaccaacuucagugggcccgagccuggaggcgcaccacagacaugcgcccuggcuccgagcgaagcauccggugcccaguaucccccuccacccgagacccuuggggcuuacgccggaggcccuggccuggucgcgggguugcucggaucugaggaucauucggguuggguucggccagcacugcgcgcccgagcucccgacgccuuugugggcccggcacuggcuccugcccccgcgccagaaccuaaggcccucgcauuacaacccguauacccagggcccggagcuggcucaagcgguggguauuucccucguacuggacugagugugccagccgcuuccggcgccccguacggccuuuugucuggguaucccgcaauguacccugccccacaguaucagggacacuuucagcuguucagaggucuacaaggccccgcuccugggccagcgacaagccccuccuuucucucaugucugggaccgggcaccgucgguacggggcuuggcggaacugcagaggauccuggcgugauugccgaaaccgcuccaaguaaaagggggcggcgcagcugggccagaaagaggcaggcagcccauacaugcgcucaccccggaugugguaaaucuuacacuaaguccucacaucugaaggcccacuugcggacccacacaggcgagaaaccuuacgcaugcaccugggaaggguguggauggcgcuucgcgcgaagcgacgagcucacgagacauuauaggaagcacacuggccagcggcccuuucguugccagcuguguccacgcgcuuucaguagaucugaccauuuagcccugcacaugaaaaggcaccucuga

SEQ ID NO: 9896 - RNA, 1089 nt, Artificial Sequence
  derived and/or modified sequence opt4 from Klf1__Homo_sapiens__AAB51173
auggccaccgccgagaccgcccugcccagcaucagcacccugaccgcccugggccccuuccccgacacccaggacgacuuccugaagugguggagaagcgaggaggcccaggacaugggccccggcccccccgaccccaccgagcccccccugcacgugaagagcgaggaccagcccggcgaggaggaggacgacgagagaggcgccgacgccaccugggaccuggaccugcugcugaccaacuucagcggccccgagcccggcggcgccccccagaccugcgcccuggcccccagcgaggccagcggcgcccaguacccccccccccccgagacccugggcgccuacgccggcggccccggccugguggccggccugcugggcagcgaggaccacagcggcugggugagacccgcccugagagccagagcccccgacgccuucgugggccccgcccuggcccccgcccccgcccccgagcccaaggcccuggcccugcagcccguguaccccggccccggcgccggcagcagcggcggcuacuuccccagaaccggccugagcgugcccgccgccagcggcgcccccuacggccugcugagcggcuaccccgccauguaccccgccccccaguaccagggccacuuccagcuguucagaggccugcagggccccgcccccggccccgccaccagccccagcuuccugagcugccugggccccggcaccgugggcaccggccugggcggcaccgccgaggaccccggcgugaucgccgagaccgcccccagcaagagaggcagaagaagcugggccagaaagagacaggccgcccacaccugcgcccaccccggcugcggcaagagcuacaccaagagcagccaccugaaggcccaccugagaacccacaccggcgagaagcccuacgccugcaccugggagggcugcggcuggagauucgccagaagcgacgagcugaccagacacuacagaaagcacaccggccagagacccuucagaugccagcugugccccagagccuucagcagaagcgaccaccuggcccugcacaugaagagacaccuguga

SEQ ID NO: 9897 - RNA, 1089 nt, Artificial Sequence
  derived and/or modified sequence opt5 from Klf1__Homo_sapiens__AAB51173
auggccaccgcugagacagcccugcccagcaucuccacgcucaccgcgcugggcccuuucccggacacacaggaugacuuucuuaagugguggagaucugaagaggcucaagauauggggcccggaccucccgacccuaccgaacccccucugcacgugaaaagcgaggaucagccgggcgaagaggaggacgaugaacgcggggccgacgccacaugggaucucgaccugcuucugaccaacuucuccggacccgagccuggcggggcuccccagacaugcgcccucgcuccuucugaagccagcggagcgcaguaucccccgccucccgagacccugggcgccuacgcuggcgggccuggacuggucgccggccuccugggguccgaggaucauucuggauggguucggcccgcucuuagagcccgggcgcccgacgccuuugugggcccugcucuggccccggcucccgccccugaacccaaggcccucgcucugcaaccuguguaccccgggccgggagcgggcagcuccggcggguauuucccucgcacgggacuuagcguccccgccgcuucuggcgccccuuacgggcugcucuccggauaucccgccauguacccugcuccccaguaucagggccacuuucagcuguucagagggcugcaaggaccggccccuggccccgcgaccagccccucuuuucucuccugucugggcccugggacagugggaaccggccuugggggaacagcugaggauccgggcguuauugccgaaaccgcccccagcaaacgggggcgcagaucuugggcucggaagcgccaggccgcucauacgugcgcccacccuggcuguggaaaauccuacacaaagagcucccaucugaaggcgcaccucagaacccacacaggcgagaaacccuacgccugcaccugggaaggguguggauggcgguucgcucgcucugacgagcugaccagacauuaucggaagcacacaggccagcgcccuuuuagaugccagcuuuguccccgggccuucagcagauccgaccaucuggcucuccacaugaaacgccaccuguga

SEQ ID NO: 9898 - RNA, 1089 nt, Artificial Sequence
  derived and/or modified sequence opt6 from Klf1__Homo_sapiens__AAB51173
auggcaacagcagaaacagcacuaccaucuauuucaacacuuacagcauuagguccuuuuccagauacacaagacgauuuuuuaaaaugguggagaucagaagaagcucaagauaugggaccaggaccaccagauccaacagaaccuccucuacauguaaaaucagaagaucaacccggugaagaagaagaugacgaacguggagcagacgcaacuugggaucuugacuuauuauuaacuaauuuuucaggaccagaaccaggaggagcaccacaaacaugcgcauuagcaccaagcgaagcuucaggagcacaauauccuccaccuccagaaacacucggagcuuaugcuggugguccaggauuaguagccggucuauuagguucagaagaccauucugguuggguacgaccagcauuaagagcaagggcaccugaugcauuugucggaccagcuuuagcaccagcuccagcuccagaaccaaaagcacuagcauuacaaccagucuauccaggccccggagcaggauccuccggagguuacuuccccagaacuggauuaucaguacccgcugcaucaggagccccauacggauuauuaucaggauauccugcaauguauccagcaccacaauaucaaggucacuuccaauuauuuaggggacuucaaggaccugcucccggaccagcaacaucaccaucuuuuuuaucaugucuuggaccaggaacaguaggaacaggauuagguggaacagcagaagauccaggaguaauagcagaaacagcaccaucuaaaagaggaagaagaucaugggcacgaaaaagacaagcugcacauacaugcgcacauccaggauguggaaaaucauacacaaaaagcucacaucuaaaagcacacuugagaacacauacuggugaaaaaccauaugcauguacaugggaaggaugugguuggagauucgcaagaucugaugaauuaacuagacauuaccgaaaacauacaggucaaagaccauucagaugccaauuauguccaagagcuuuuuccagaucagaucauuuagcacuccauaugaaaagacauuuauaa

SEQ ID NO: 9899 - protein, 355 aa, Artificial Sequence
  Klf2__Homo_sapiens__Q9Y5W3
MALSEPILPSFSTFASPCRERGLQERWPRAEPESGGTDDDLNSVLDFILSMGLDGLGAEAAPEPPPPPPPPAFYYPEPGAPPPYSAPAGGLVSELLRPELDAPLGPALHGRFLLAPPGRLVKAEPPEADGGGGYGCAPGLTRGPRGLKREGAPGPAASCMRGPGGRPPPPPDTPPLSPDGPARLPAPGPRASFPPPFGGPGFGAPGPGLHYAPPAPPAFGLFDDAAAAAAALGLAPPAARGLLTPPASPLELLEAKPKRGRRSWPRKRTATHTCSYAGCGKTYTKSSHLKAHLRTHTGEKPYHCNWDGCGWKFARSDELTRHYRKHTGHRPFQCHLCDRAFSRSDHLALHMKRHM

SEQ ID NO: 9900 - RNA, 1068 nt, Artificial Sequence
  Klf2__Homo_sapiens__AAF13295
auggcgcugagugaacccauccugccguccuucuccacuuucgccagcccgugccgcgagcgcggccugcaggagcgcuggccgcgcgccgaacccgaguccggcggcaccgacgacgaccucaacagcgugcuggacuucauccuguccauggggcuggauggccugggcgccgaggccgccccggagccgccgccgccgcccccgccgccugcguucuauuaccccgaacccggcgcgcccccgcccuacagcgcccccgcggguggccuggugucugagcugcugcgacccgagcuggaugcgccgcuggggcccgcacugcacggccgcuuucugcuggcgccgcccggccgccuggucaaggccgagcccccugaagcggacggcggcggcggcuacggcugcgcccccgggcugacccguggaccgcgcggccucaagcgcgagggcgccccgggcccggcggcuucgugcaugcgaggucccgggggccgccccccgccgccgcccgacacaccgccgcucagccccgacggccccgcgcgccugcccgcgcccgguccgcgcgccuccuucccgccgccuuucgguggcccugguuucggcgcgcccgggcccggccugcauuacgcgccgccugcgcccccagccuucggucucuucgacgacgcggccgccgccgcggcagcccugggccuggcgccccccgccgcccgcggucuccucacgccgccugcguccccgcuggagcugcuggaggccaagccaaagcgcggccgccgcucuuggccccgcaaacgcaccgccacucacaccugcagcuacgcgggcugcggcaagaccuacaccaagaguucgcaucugaaggcgcaucugcgcacgcacacaggugagaagcccuaccacugcaacugggacggcugcggcuggaaguuugcgcgcucagacgagcucacgcgccacuaccgaaagcacacgggccaccggccauuccagugccaucugugcgaucgugccuuuucgcgcuccgaucaccuggcgcugcacaugaaacggcacauguag

SEQ ID NO: 9901 - RNA, 1068 nt, Artificial Sequence
  derived and/or modified sequence opt1 from Klf2__Homo_sapiens__AAF13295
auggcccugagcgagcccauccucccguccuucagcaccuucgccucccccugccgcgagcggggccugcaggagcgcuggccccgggcggagcccgagagcgggggcaccgacgacgaccugaacuccgugcucgacuucauccugagcauggggcuggacggccucggggccgaggccgccccggagcccccccccccgcccccccccccggccuucuacuaccccgagcccggcgcgcccccgcccuacuccgcccccgccggcgggcuggucagcgagcugcuccgccccgagcuggacgccccgcugggccccgcgcuccacgggcgguuccugcuggccccccccggccgccucgugaaggccgagccgcccgaggccgacgggggcggcggguacggcugcgcccccgggcugacgcggggcccccgcggccugaagcgggagggggcgccgggccccgccgccuccugcaugcgcgggcccggcgggcggccgcccccccccccggacacccccccccucagccccgacggcccggcccgccugcccgcccccggcccccgggcguccuucccgccccccuucgggggccccggguucggcgccccggggcccggccugcacuacgccccccccgccccgcccgccuucggccucuucgacgacgcggccgccgccgccgcggcccuggggcuggccccccccgccgcgcgcggccuccugaccccgcccgccagcccccuggagcuccuggaggccaagccgaagcgggggcgccgguccuggccccgcaagcggaccgccacgcacaccugcagcuacgccggcugcgggaagaccuacaccaaguccagccaccugaaggcgcaccuccgcacgcacaccggcgagaagcccuaccacugcaacugggacggcugcggguggaaguucgcccgguccgacgagcugacccgccacuaccgcaagcacaccggccaccggcccuuccagugccaccugugcgaccgcgccuucagccgguccgaccaccucgcccugcacaugaagcgccacauguga

SEQ ID NO: 9902 - RNA, 1068 nt, Artificial Sequence
  derived and/or modified sequence opt2 from Klf2__Homo_sapiens__AAF13295
auggcccucuccgagcccauccuccccuccuucuccaccuucgccucccccugccgcgagcgcggccuccaggagcgcuggccccgcgccgagcccgaguccggcggcaccgacgacgaccucaacuccguccucgacuucauccucuccaugggccucgacggccucggcgccgaggccgcccccgagccccccccccccccccccccccccgccuucuacuaccccgagcccggcgcccccccccccuacuccgcccccgccggcggccucgucuccgagcuccuccgccccgagcucgacgccccccucggccccgcccuccacggccgcuuccuccucgccccccccggccgccucgucaaggccgagccccccgaggccgacggcggcggcggcuacggcugcgcccccggccucacccgcggcccccgcggccucaagcgcgagggcgcccccggccccgccgccuccugcaugcgcggccccggcggccgccccccccccccccccgacacccccccccucucccccgacggccccgcccgccuccccgcccccggcccccgcgccuccuuccccccccccuucggcggccccggcuucggcgcccccggccccggccuccacuacgccccccccgccccccccgccuucggccucuucgacgacgccgccgccgccgccgccgcccucggccucgccccccccgccgcccgcggccuccucaccccccccgccuccccccucgagcuccucgaggccaagcccaagcgcggccgccgcuccuggccccgcaagcgcaccgccacccacaccugcuccuacgccggcugcggcaagaccuacaccaaguccucccaccucaaggcccaccuccgcacccacaccggcgagaagcccuaccacugcaacugggacggcugcggcuggaaguucgcccgcuccgacgagcucacccgccacuaccgcaagcacaccggccaccgccccuuccagugccaccucugcgaccgcgccuucucccgcuccgaccaccucgcccuccacaugaagcgccacauguga

SEQ ID NO: 9903 - RNA, 1068 nt, Artificial Sequence
  derived and/or modified sequence opt3 from Klf2__Homo_sapiens__AAF13295
auggcccugagcgagcccauccucccuuccuucucuaccuuugcuucaccaugcagagaaaggggccuucaggagcgguggccgcgcgcagaacccgagagugggggaacagacgaugaccugaacagcguguuggauuucauuuuauccaugggucuggacggccuaggggccgaagcggcuccugagccacccccuccacccccuccaccggccuuuuacuaucccgagccuggagcaccacccccuuacucugccccagcuggcggucucgucucggaacugcuucgacccgagcuggaugcaccguuggggccugcccuccacggacguuuccugcuggcucccccaggcagacucguuaaggccgaaccucccgaggcggacggcgggggagguuauggcugugcaccaggguuaacuaggggaccccggggccugaaacgcgagggugccccugggccagcugccucaugcaugagaggaccgggcggcaggcccccuccacccccugauacgccaccccuuagcccggacgggccugcacgguugccagcucccggaccucgcgccaguuuucccccaccuuucgguggccccggguuuggagcgccaggcccgggucugcauuacgccccucccgcaccacccgcuuucgggcuauuugaugacgccgcugccgcagccgcugcgcucggccuggcaccuccagccgcucgaggacuucugacacccccugccuccccguuggaacuccuggaggcaaagccaaaaagaggcaggcggucuuggccccguaagcgcaccgccacucacaccuguagcuaugcugggugcggaaaaacauacaccaaguccucacauuuaaaggcccaccugagaacucauacaggugaaaaaccuuaucacuguaauugggauggcugcggguggaaguucgcaaggagugacgagcucacccggcacuaccgaaaacauacgggacaccgcccauuucaaugucaucuuugcgauagagcguucagcaggucugaccaccuggcuuugcacaugaagcggcauauguga

SEQ ID NO: 9904 - RNA, 1068 nt, Artificial Sequence
  derived and/or modified sequence opt4 from Klf2__Homo_sapiens__AAF13295
auggcccugagcgagcccauccugcccagcuucagcaccuucgccagccccugcagagagagaggccugcaggagagauggcccagagccgagcccgagagcggcggcaccgacgacgaccugaacagcgugcuggacuucauccugagcaugggccuggacggccugggcgccgaggccgcccccgagccccccccccccccccccccccccgccuucuacuaccccgagcccggcgcccccccccccuacagcgcccccgccggcggccuggugagcgagcugcugagacccgagcuggacgccccccugggccccgcccugcacggcagauuccugcuggccccccccggcagacuggugaaggccgagccccccgaggccgacggcggcggcggcuacggcugcgcccccggccugaccagaggccccagaggccugaagagagagggcgcccccggccccgccgccagcugcaugagaggccccggcggcagacccccccccccccccgacacccccccccugagccccgacggccccgccagacugcccgcccccggccccagagccagcuuccccccccccuucggcggccccggcuucggcgcccccggccccggccugcacuacgccccccccgccccccccgccuucggccuguucgacgacgccgccgccgccgccgccgcccugggccuggccccccccgccgccagaggccugcugaccccccccgccagcccccuggagcugcuggaggccaagcccaagagaggcagaagaagcuggcccagaaagagaaccgccacccacaccugcagcuacgccggcugcggcaagaccuacaccaagagcagccaccugaaggcccaccugagaacccacaccggcgagaagcccuaccacugcaacugggacggcugcggcuggaaguucgccagaagcgacgagcugaccagacacuacagaaagcacaccggccacagacccuuccagugccaccugugcgacagagccuucagcagaagcgaccaccuggcccugcacaugaagagacacauguga

SEQ ID NO: 9905 - RNA, 1068 nt, Artificial Sequence
  derived and/or modified sequence opt5 from Klf2__Homo_sapiens__AAF13295
auggcccugagcgagcccauccucccuuccuucucuaccuuugcuagcccgugcagagaacggggccugcaggagcgcuggcccagagccgaaccugaguccgggggaacagacgaugaccuuaacucugugcuggauuucauucucagcaugggccuggacgggcuuggagcggaagcugcccccgagccucccccuccgcccccucccccugccuuuuacuaucccgagccgggcgcuccucccccuuacuccgcccccgcugggggacuggucucugaacuccugcggcccgagcuggaugccccucucggcccggcgcugcacggccgcuuccuucuggcucccccugggagacucguuaaggccgaacccccugaggccgacggaggcgggggauauggcugugcucccgggcugacgcggggaccgcgcggccuuaaaagagagggcgccccugggcccgcggccagcugcaugcggggaccuggcgggagacccccucccccgccugauaccccuccccugucccccgacggaccggcucgccuccccgccccuggcccccgggcuagcuuuccucccccuuucgggggacccggcuuuggcgccccggggccuggacugcauuacgccccucccgcucccccggcguucggccuguuugaugacgccgcugccgccgcugccgcgcucgggcuggcuccucccgccgcccgcggacuucugacaccucccgcuucuccccucgaacugcuugaggccaagccuaaaagaggccggcgcuccuggccgagaaagcggaccgcuacacacaccuguagcuaugccgggugcggcaaaacauacaccaagucuucccaucugaaggcgcaccucagaacgcauaccggagaaaaacccuaucacuguaauugggauggcugcggguggaaguucgcccgcagcgacgagcugacacggcacuacagaaaacauaccggacaccgcccuuuucaaugucaucugugcgaucgggcuuucucuagauccgaccaccucgcccugcacaugaagcgccauauguga

SEQ ID NO: 9906 - RNA, 1068 nt, Artificial Sequence
  derived and/or modified sequence opt6 from Klf2__Homo_sapiens__AAF13295
auggcucuaagugaaccaauauuaccaaguuuuucuacauuugcaucaccauguagagaaagaggacuacaagaaagauggccaagagcagaaccagaaucaggaggaacagaugaugaucuaaauucuguauuagacuuuauauuaucuaugggauuagauggauuaggagcagaagcagcaccagaacccccaccaccaccaccuccaccagcuuuuuacuacccagaaccuggugcuccaccaccauauagugcaccagcaggcggauuaguauccgaauuauuaagaccagaacuugacgcuccauuaggaccagcauuacauggaagauuuuuacuagcaccaccaggaagauuaguaaaagcagaaccaccugaagcagaugguggaggaggauauggaugugcaccaggacuaacaagaggaccaagaggauuaaaaagagaaggagcaccaggaccugcagcaucaugcaugagaggaccaggagguagaccaccaccaccaccagauacaccaccauuaagcccagauggaccugcaagauuaccugcaccuggacccagagcuucauuuccaccuccauuuggaggaccaggauuuggagcaccugguccaggacuacauuaugcuccaccagcacccccagcauuuggacuuuuugacgaugccgcugcagcagcagcugcauuaggacuagcaccaccagcagcaagagguuuacuaacacccccagcaagcccauuagaauuacuugaagcaaaaccaaaaagagguagaagaucauggccaagaaaaagaacugcaacacauacauguaguuaugcaggcugugguaaaacauauacaaaaaguucucacuuaaaagcacauuuaagaacacauacuggagaaaaaccauaucacuguaauugggacggaugcgguuggaaauuugcuagaucagaugaacuaacaagacauuaucgaaaacauacaggacauagaccauuccaaugucauuuaugugauagagccuuuucuagaucugaucauuuagcacuucauaugaaaagacauauguaa

SEQ ID NO: 9907 - protein, 145 aa, Artificial Sequence [sequence omitted]

SEQ ID NO: 9908 - RNA, 438 nt, Artificial Sequence
  Klf4__Homo_sapiens__ADL14248
auggcugucagcgacgcgcugcucccaucuuucuccacguucgcgucuggcccggcgggaagggagaagacacugcgucaagcaggugccccgaauaaccucaugccacccgguuccugcaugccagaggagcccaagccaaagaggggaagacgaucguggccccggaaaaggaccgccacccacacuugugauuacgcgggcugcggcaaaaccuacacaaagaguucccaucucaaggcacaccugcgaacccacacaggugagaaaccuuaccacugugacugggacggcuguggauggaaauucgcccgcucagaugaacugaccuggcacuaccguaaacacacggggcaccgcccguuccagugccaaaaaugcgaccgagcauuuuccaggucggaccaccucgccuuacacaugaagaggcauuuuuaa

SEQ ID NO: 9909 - RNA, 438 nt, Artificial Sequence
  derived and/or modified sequence opt1 from Klf4__Homo_sapiens__ADL14248
auggccgugagcgacgcccugcuccccuccuucagcaccuucgcguccggcccggccgggcgcgagaagacccugcggcaggccggcgcccccaacaaccugaugccgcccgggagcugcaugcccgaggagcccaagcccaagcgcggccggcgcuccuggccccggaagcgcacggccacccacacgugcgacuacgcggggugcggcaagaccuacaccaagagcucccaccucaaggcccaccuccggacccacaccggcgagaagccguaccacugcgacugggacgggugcggcuggaaguucgcccgcagcgacgagcugaccuggcacuaccggaagcacacggggcaccgccccuuccagugccagaagugcgaccgggccuucucccgcagcgaccaccuggcgcugcacaugaagcggcacuucuga

SEQ ID NO: 9910 - RNA, 438 nt, Artificial Sequence
  derived and/or modified sequence opt2 from Klf4__Homo_sapiens__ADL14248
auggccgucuccgacgcccuccuccccuccuucuccaccuucgccuccggccccgccggccgcgagaagacccuccgccaggccggcgcccccaacaaccucaugccccccggcuccugcaugcccgaggagcccaagcccaagcgcggccgccgcuccuggccccgcaagcgcaccgccacccacaccugcgacuacgccggcugcggcaagaccuacaccaaguccucccaccucaaggcccaccuccgcacccacaccggcgagaagcccuaccacugcgacugggacggcugcggcuggaaguucgcccgcuccgacgagcucaccuggcacuaccgcaagcacaccggccaccgccccuuccagugccagaagugcgaccgcgccuucucccgcuccgaccaccucgcccuccacaugaagcgccacuucuga

SEQ ID NO: 9911 - RNA, 438 nt, Artificial Sequence
  derived and/or modified sequence opt3 from Klf4__Homo_sapiens__ADL14248
auggccgugagcgacgcucugcuccccuccuucucuaccuuugcaucaggcccugccgggagagagaagacacuuaggcaggcgggagcuccaaacaaucugaugccgcccgguaguugcaugccugaggaaccaaaacccaagcggggccgccgaagcuggccucguaaaagaacugccacgcacaccugugauuacgcagggugcggaaagacauauacuaaauccucucauuugaaggcccacuuaaggacccauacaggcgaaaagccauaccacugugacugggaugguugcggguggaaauucgcucggucggacgagcugaccuggcauuaucgcaagcacacuggacacagacccuuucaaugucagaaaugcgauagggcauucucacggagcgaccaucuagcccuccacaugaagcgccauuuuuga

SEQ ID NO: 9912 - RNA, 438 nt, Artificial Sequence
  derived and/or modified sequence opt4 from Klf4__Homo_sapiens__ADL14248
auggccgugagcgacgcccugcugcccagcuucagcaccuucgccagcggccccgccggcagagagaagacccugagacaggccggcgcccccaacaaccugaugccccccggcagcugcaugcccgaggagcccaagcccaagagaggcagaagaagcuggcccagaaagagaaccgccacccacaccugcgacuacgccggcugcggcaagaccuacaccaagagcagccaccugaaggcccaccugagaacccacaccggcgagaagcccuaccacugcgacugggacggcugcggcuggaaguucgccagaagcgacgagcugaccuggcacuacagaaagcacaccggccacagacccuuccagugccagaagugcgacagagccuucagcagaagcgaccaccuggcccugcacaugaagagacacuucuga

SEQ ID NO: 9913 - RNA, 438 nt, Artificial Sequence
  derived and/or modified sequence opt5 from Klf4__Homo_sapiens__ADL14248
auggccgugagcgacgcucugcuccccuccuucucuaccuuugccagcggcccugcggggagagagaagacacugcggcaggcuggagccccgaacaaucuuaugcccccuggcuccugcaugcccgaggaaccuaaacccaagcgcgggagacggucuuggccucgcaaaagaacggccacccacacaugugauuacgcuggaugcggcaagaccuauacaaaaagcucccaucugaaggcccaccuccggacccauacaggggaaaagccguaccacugugacugggauggaugcggcuggaaauucgcucgcucugacgagcugaccuggcauuauagaaagcacacgggccaccggcccuuucaaugucagaaaugcgaucgcgccuucagcagauccgaccaucuugcgcugcacaugaagcggcauuuuuga

SEQ ID NO: 9914 - RNA, 438 nt, Artificial Sequence
  derived and/or modified sequence opt6 from Klf4__Homo_sapiens__ADL14248
auggcaguaagcgaugcauuacuaccaucauuuagcacauucgcaagcggaccagcaggaagagaaaaaacauuaagacaagcaggagcaccaaacaacuuaaugccaccaggaucaugcaugccagaagaaccaaaaccaaaaagaggaagaagaucauggccaagaaaaagaacagcaacacacacaugugauuacgcaggaugcggaaaaacauacacaaaaagcucacacuuaaaagcacacuuaagaacacacacaggagaaaaaccauaccauugcgauugggauggauguggauggaaauuugcaagaagcgaugaauuaacauggcacuauagaaaacacacaggacacagaccauuccaaugccaaaaaugugacagagcauuuagcagaagcgaucacuuagcauuacacaugaaaagacacuuuuaa

SEQ ID NO: 9915 - protein, 111 aa, Artificial Sequence
  Klf4__Homo_sapiens__L0R3V2
MPPGSCMPEEPKPKRGRRSWPRKRTATHTCDYAGCGKTYTKSSHLKAHLRTHTGEKPYHCDWDGCGWKFARSDELTRHYRKHTGHRPFQCQKCDRAFSRSDHLALHMKRHF

SEQ ID NO: 9916 - RNA, 336 nt, Artificial Sequence
  Klf4__Homo_sapiens__CCO02799
augccacccgguuccugcaugccagaggagcccaagccaaagaggggaagacgaucguggccccggaaaaggaccgccacccacacuugugauuacgcgggcugcggcaaaaccuacacaaagaguucccaucucaaggcacaccugcgaacccacacaggugagaaaccuuaccacugugacugggacggcuguggauggaaauucgcccgcucagaugaacugaccaggcacuaccguaaacacacggggcaccgcccguuccagugccaaaaaugcgaccgagcauuuuccaggucggaccaccucgccuuacacaugaagaggcauuuuuaa

SEQ ID NO: 9917 - RNA, 336 nt, Artificial Sequence
  derived and/or modified sequence opt1 from Klf4__Homo_sapiens__CCO02799
augcccccgggcagcugcaugcccgaggagcccaagcccaagcgcgggcggcgcuccuggccgcggaagcgcaccgccacccacacgugcgacuacgccggcugcgggaagaccuacaccaagagcucccaccugaaggcgcaccuccggacccacacgggcgagaagcccuaccacugcgacugggacgggugcggcuggaaguucgcccgcagcgacgagcugacccggcacuaccgcaagcacaccggccaccggcccuuccagugccagaagugcgaccgcgccuucucccggagcgaccaccuggcccuccacaugaagcgccacuucuga

SEQ ID NO: 9918 - RNA, 336 nt, Artificial Sequence
  derived and/or modified sequence opt2 from Klf4__Homo_sapiens__CCO02799
augccccccggcuccugcaugcccgaggagcccaagcccaagcgcggccgccgcuccuggccccgcaagcgcaccgccacccacaccugcgacuacgccggcugcggcaagaccuacaccaaguccucccaccucaaggcccaccuccgcacccacaccggcgagaagcccuaccacugcgacugggacggcugcggcuggaaguucgcccgcuccgacgagcucacccgccacuaccgcaagcacaccggccaccgccccuuccagugccagaagugcgaccgcgccuucucccgcuccgaccaccucgcccuccacaugaagcgccacuucuga

SEQ ID NO: 9919 - RNA, 336 nt, Artificial Sequence
  derived and/or modified sequence opt3 from Klf4__Homo_sapiens__CCO02799
augcccccuggcagcugcaugccagaggaaccgaagcccaaaagagggaggcgguccuggccucgcaagcgaaccgccacacacacuugugacuacgcuggaugcgguaaaacguauaccaagucuucacaucugaaagcacaccuccguacacauacuggcgagaagccauaccacugugauugggacgggugcggauggaaguucgccagaagugaugaacuuaccaggcauuaucggaaacacacaggccaccgccccuuucagugucaaaagugcgacagagcguucagcagguccgaucaucuggcuuugcacaugaaacggcauuuuuga

SEQ ID NO: 9920 - RNA, 336 nt, Artificial Sequence
  derived and/or modified sequence opt4 from Klf4__Homo_sapiens__CCO02799
augccccccggcagcugcaugcccgaggagcccaagcccaagagaggcagaagaagcuggcccagaaagagaaccgccacccacaccugcgacuacgccggcugcggcaagaccuacaccaagagcagccaccugaaggcccaccugagaacccacaccggcgagaagcccuaccacugcgacugggacggcugcggcuggaaguucgccagaagcgacgagcugaccagacacuacagaaagcacaccggccacagacccuuccagugccagaagugcgacagagccuucagcagaagcgaccaccuggcccugcacaugaagagacacuucuga

SEQ ID NO: 9921 - RNA, 336 nt, Artificial Sequence
  derived and/or modified sequence opt5 from Klf4__Homo_sapiens__CCO02799
augcccccuggcagcugcaugccggaggaacccaagccuaaaagagggcggcgcuccuggcccagaaagcggaccgccacacacacgugugacuacgcuggaugcggcaaaaccuauacaaagucuagccaucugaaagcccaccuccgcacccauacaggggagaagccuuaccacugugauugggacggaugcggcuggaaguucgcgagauccgaugaacugacccggcauuaucgcaaacacacagggcacagacccuuucagugucaaaagugcgaccgggcuuucucucgcagcgaucaucuugcccugcacaugaaaagacauuuuuga

SEQ ID NO: 9922 - RNA, 336 nt, Artificial Sequence
  derived and/or modified sequence opt6 from Klf4__Homo_sapiens__CCO02799
augccaccaggaucaugcaugccagaagaaccaaaaccaaaaagaggaagaagaucauggccaagaaaaagaacagcaacacacacaugcgacuacgcaggaugcggaaaaacauacacaaaaucaucacaccuaaaagcacaccuaagaacacacacaggagaaaaaccauaccacugcgacugggacggaugcggauggaaauucgcaagaucagacgaacuaacaagacacuacagaaaacacacaggacacagaccauuccaaugccaaaaaugcgacagagcauucucaagaucagaccaccuagcacuacacaugaaaagacacuucuaa

SEQ ID NO: 9923 - protein, 74 aa, Artificial Sequence
  Klf5__Homo_sapiens__A0A0A0N0L4
MATRVLSMSARLGPVPQPPAPQDEPVFAQLKPVLGAANPARDAALFPGEELKHAHHRPQAQPAAASRGPGPDKM

SEQ ID NO: 9924 - RNA, 225 nt, Artificial Sequence
  Klf5__Homo_sapiens__AER93390
auggcuacaagggugcugagcaugagcgcccgccugggacccgugccccagccgccggcgccgcaggacgagccgguguucgcgcagcucaagccggugcugggcgccgcgaauccggcccgcgacgcggcgcucuuccccggcgaggagcugaagcacgcgcaccaccgcccgcaggcgcagcccgcggcugccuccagaggaccugguccagacaagauguga

SEQ ID NO: 9925 - RNA, 225 nt, Artificial Sequence
  derived and/or modified sequence opt1 from Klf5__Homo_sapiens__AER93390
auggccacccgcgugcugagcauguccgcccggcucggccccgucccgcagccgcccgcgccccaggacgagcccguguucgcccagcugaagcccgugcugggggccgccaaccccgcccgcgacgcggcccucuuccccggcgaggagcugaagcacgcccaccaccggccgcaggcccagcccgcggccgccagccgcgggcccggccccgacaagauguga

SEQ ID NO: 9926 - RNA, 225 nt, Artificial Sequence
  derived and/or modified sequence opt2 from Klf5__Homo_sapiens__AER93390
auggccacccgcguccucuccauguccgcccgccucggccccgucccccagccccccgccccccaggacgagcccgucuucgcccagcucaagcccguccucggcgccgccaaccccgcccgcgacgccgcccucuuccccggcgaggagcucaagcacgcccaccaccgcccccaggcccagcccgccgccgccucccgcggccccggccccgacaagauguga

SEQ ID NO: 9927 - RNA, 225 nt, Artificial Sequence
  derived and/or modified sequence opt3 from Klf5__Homo_sapiens__AER93390
auggccaccagagugcugagcauguccgcuaggcucggccccgucccucagccaccggcaccccaagacgagccuguuuucgcccagcuuaagccagugcugggggcggcuaaccccgcccgggaugcagccuuguuuccuggagaagaguuaaaacacgcucaucaccgcccacaggcacagcccgccgcugccucucgagguccuggcccagacaagauguga

SEQ ID NO: 9928 - RNA, 225 nt, Artificial Sequence
  derived and/or modified sequence opt4 from Klf5__Homo_sapiens__AER93390
auggccaccagagugcugagcaugagcgccagacugggccccgugccccagccccccgccccccaggacgagcccguguucgcccagcugaagcccgugcugggcgccgccaaccccgccagagacgccgcccuguuccccggcgaggagcugaagcacgcccaccacagaccccaggcccagcccgccgccgccagcagaggccccggccccgacaagauguga

SEQ ID NO: 9929 - RNA, 225 nt, Artificial Sequence
  derived and/or modified sequence opt5 from Klf5__Homo_sapiens__AER93390
auggccaccagagugcugagcauguccgcucggcucggccccgucccucagccgcccgccccucaagacgagcccguuuucgcgcagcugaagccugugcuuggggcugccaaccccgcccgcgaugcugcccuguuuccuggagaggaacucaaacacgcucaucacagaccgcaggcccagcccgcggccgcuucucggggcccugggcccgacaagauguga

SEQ ID NO: 9930 - RNA, 225 nt, Artificial Sequence
  derived and/or modified sequence opt6 from Klf5__Homo_sapiens__AER93390
auggcaacaagaguauuaagcaugagcgcaagauuaggaccaguaccacaaccaccagcaccacaagacgaaccaguauucgcacaauuaaaaccaguauuaggagcagcaaauccagcaagagaugcagcacuauuuccaggagaagaauuaaaacacgcacaccauagaccacaagcacaaccagcagcagcaucaagaggaccaggaccagauaaaauguaa

SEQ ID NO: 9931 - protein, 26 aa, Artificial Sequence
  Klf5__Homo_sapiens__A0A0A0N0L7
MATRVLSMSARLGPAAASRGPGPDKM

SEQ ID NO: 9932 - RNA, 81 nt, Artificial Sequence
  Klf5__Homo_sapiens__AER93389
auggcuacaagggugcugagcaugagcgcccgccugggacccgcggcugccuccagaggaccugguccagacaagauguga

SEQ ID NO: 9933 - RNA, 81 nt, Artificial Sequence
  derived and/or modified sequence opt1 from Klf5__Homo_sapiens__AER93389
auggccacccgcgugcugagcauguccgcccggcucggccccgcggccgccagccgcgggccgggccccgacaagauguga

SEQ ID NO: 9934 - RNA, 81 nt, Artificial Sequence
  derived and/or modified sequence opt2 from Klf5__Homo_sapiens__AER93389
auggccacccgcguccucuccauguccgcccgccucggccccgccgccgccucccgcggccccggccccgacaagauguga

SEQ ID NO: 9935 - RNA, 81 nt, Artificial Sequence
  derived and/or modified sequence opt3 from Klf5__Homo_sapiens__AER93389
auggccaccagagugcugagcauguccgcuaggcucggccccgcagccgcgucucgggggccuggaccagacaagauguga

SEQ ID NO: 9936 - RNA, 81 nt, Artificial Sequence
  derived and/or modified sequence opt4 from Klf5__Homo_sapiens__AER93389
auggccaccagagugcugagcaugagcgccagacugggccccgccgccgccagcagaggccccggccccgacaagauguga

SEQ ID NO: 9937 - RNA, 81 nt, Artificial Sequence
  derived and/or modified sequence opt5 from Klf5__Homo_sapiens__AER93389
auggccaccagagugcugagcauguccgcucggcucggccccgccgcggcuucucgcgggccuggaccggacaagauguga

SEQ ID NO: 9938 - RNA, 81 nt, Artificial Sequence
  derived and/or modified sequence opt6 from Klf5__Homo_sapiens__AER93389
auggcaacaagaguauuaagcaugagcgcaagauuaggaccagcagcagcaucaagaggaccaggaccagauaaaauguaa

SEQ ID NO: 9939 - protein, 450 aa, Artificial Sequence
  Klf5__Homo_sapiens__A0A0A0N0M4
MATRVLSMSARLGPVPQPPAPQDEPVFAQLKPVLGAANPARDAALFPGEELKHAHHRPQAPQPAQPPATGPRLPPEDLVQTRCEMEKYLTPQLPPVPIIPEHKKYRRDSASVVDQFFTDTEGLPYSINMNVFLPDITHLRTGLYKSQRPCVTHIKTEPVAIFSHQSETTAPPPAPTQALPEFTSIFSSHQTAAPEVNNIFIKQELPTPDLHLSVPTQQGHLYQLLNTPDLDMPSSTNQTAAMDTLNVSMSAAMAGLNTHTSAVPQTAVKQFQGMPPCTYTMPSQFLPQQATYFPPSPPSSEPGSPDRQAEMLQNLTPPPSYAATIASKLAIHNPNLPTTLPVNSQNIQPVRYNRRSNPDLEKRRIHYCDYPGCTKVYTKSSHLKAHLRTHTGEKPYKCTWEGCDWRFARSDELTRHYRKHTGAKPFQCGVCNRSFSRSDHLALHMKRHQN

SEQ ID NO: 9940 - RNA, 1353 nt, Artificial Sequence
  Klf5__Homo_sapiens__AER93391
auggcuacaagggugcugagcaugagcgcccgccugggacccgugccccagccgccggcgccgcaggacgagccgguguucgcgcagcucaagccggugcugggcgccgcgaauccggcccgcgacgcggcgcucuuccccggcgaggagcugaagcacgcgcaccaccgcccgcaggccccgcagccggcccagccgcccgccaccggcccgcggcugccuccagaggaccugguccagacaagaugugaaauggagaaguaucugacaccucagcuuccuccaguuccuauaauuccagagcauaaaaaguauagacgagacagugccucagucguagaccaguucuucacugacacugaaggguuaccuuacaguaucaacaugaacgucuuccucccugacaucacucaccugagaacuggccucuacaaaucccagagaccgugcguaacacacaucaagacagaaccuguugccauuuucagccaccagagugaaacgacugccccuccuccggccccgacccaggcccucccugaguucaccaguauauucagcucacaccagaccgcagcuccagaggugaacaauauuuucaucaaacaagaacuuccuacaccagaucuucaucuuucugucccuacccagcagggccaccuguaccagcuacugaauacaccggaucuagauaugcccaguucuacaaaucagacagcagcaauggacacucuuaauguuucuaugucagcugccauggcaggccuuaacacacacaccucugcuguuccgcagacugcagugaaacaauuccagggcaugcccccuugcacauacacaaugccaagucaguuucuuccacaacaggccacuuacuuucccccgucaccaccaagcucagagccuggaaguccagauagacaagcagagaugcuccagaauuuaaccccaccuccauccuaugcugcuacaauugcuucuaaacuggcaauucacaauccaaauuuacccaccacccugccaguuaacucacaaaacauccaaccugucagauacaauagaaggaguaaccccgauuuggagaaacgacgcauccacuacugcgauuacccugguugcacaaaaguuuauaccaagucuucucauuuaaaagcucaccugaggacucacacuggugaaaagccauacaaguguaccugggaaggcugcgacuggagguucgcgcgaucggaugagcugacccgccacuaccggaagcacacaggcgccaagcccuuccagugcggggugugcaaccgcagcuucucgcgcucugaccaccuggcccugcauaugaagaggcaccagaacuga

SEQ ID NO: 9941 - RNA, 1353 nt, Artificial Sequence
  derived and/or modified sequence opt1 from Klf5__Homo_sapiens__AER93391
auggccacccgcgugcugagcauguccgcccggcucggccccgucccgcagccgcccgcgccccaggacgagcccguguucgcccagcugaagcccgugcugggggccgccaaccccgcccgcgacgcggcccucuuccccggcgaggagcugaagcacgcccaccaccggccgcaggcgccccagcccgcccagcccccggccaccgggccccgccugccgcccgaggaccucguccagacgcggugcgagauggagaaguaccugacgccccagcugccgcccgugcccaucauccccgagcacaagaaguaccgccgggacagcgccuccguggucgaccaguucuucaccgacaccgagggccuccccuacagcaucaacaugaacguguuccugcccgacaucacccaccuccgcaccgggcuguacaagucccagcggcccugcgugacccacaucaagaccgagccggucgccaucuucagccaccaguccgagacgaccgccccgccgcccgcgcccacccaggcccugcccgaguucaccagcaucuucuccagccaccagacggccgcccccgaggugaacaacaucuucaucaagcaggagcugcccacccccgaccuccaccuguccgugcccacccagcagggccaccuguaccagcuccugaacacccccgaccuggacaugccgagcuccacgaaccagaccgccgcgauggacacccucaacgucagcauguccgccgccauggccggccugaacacccacacgagcgccgugccccagaccgcggugaagcaguuccaggggaugccgcccugcaccuacaccaugcccucccaguuccugccccagcaggccacguacuucccgcccagcccgcccuccagcgagcccggcagccccgaccgccaggccgagaugcuccagaaccugacgcccccgcccuccuacgccgccaccaucgcgagcaagcuggccauccacaaccccaaccuccccaccacccugcccgucaacucccagaacauccagcccgugcgguacaaccgccggagcaaccccgaccuggagaagcgccggauccacuacugcgacuacccggggugcaccaagguguacaccaaguccagccaccucaaggcccaccuccgcacccacacgggcgagaagcccuacaagugcaccugggaggggugcgacuggcgguucgcccgcuccgacgagcugacccggcacuaccgcaagcacaccggcgcgaagcccuuccagugcggcgucugcaaccggagcuucucccgcagcgaccaccuggcccugcacaugaagcgccaccagaacuga

SEQ ID NO: 9942 - RNA, 1353 nt, Artificial Sequence
  derived and/or modified sequence opt2 from Klf5__Homo_sapiens__AER93391
auggccacccgcguccucuccauguccgcccgccucggccccgucccccagccccccgccccccaggacgagcccgucuucgcccagcucaagcccguccucggcgccgccaaccccgcccgcgacgccgcccucuuccccggcgaggagcucaagcacgcccaccaccgcccccaggccccccagcccgcccagccccccgccaccggcccccgccucccccccgaggaccucguccagacccgcugcgagauggagaaguaccucaccccccagcucccccccguccccaucauccccgagcacaagaaguaccgccgcgacuccgccuccgucgucgaccaguucuucaccgacaccgagggccuccccuacuccaucaacaugaacgucuuccuccccgacaucacccaccuccgcaccggccucuacaagucccagcgccccugcgucacccacaucaagaccgagcccgucgccaucuucucccaccaguccgagaccaccgcccccccccccgcccccacccaggcccuccccgaguucaccuccaucuucuccucccaccagaccgccgcccccgaggucaacaacaucuucaucaagcaggagcuccccacccccgaccuccaccucuccguccccacccagcagggccaccucuaccagcuccucaacacccccgaccucgacaugcccuccuccaccaaccagaccgccgccauggacacccucaacgucuccauguccgccgccauggccggccucaacacccacaccuccgccgucccccagaccgccgucaagcaguuccagggcaugccccccugcaccuacaccaugcccucccaguuccucccccagcaggccaccuacuucccccccuccccccccuccuccgagcccggcucccccgaccgccaggccgagaugcuccagaaccucacccccccccccuccuacgccgccaccaucgccuccaagcucgccauccacaaccccaaccuccccaccacccuccccgucaacucccagaacauccagcccguccgcuacaaccgccgcuccaaccccgaccucgagaagcgccgcauccacuacugcgacuaccccggcugcaccaaggucuacaccaaguccucccaccucaaggcccaccuccgcacccacaccggcgagaagcccuacaagugcaccugggagggcugcgacuggcgcuucgcccgcuccgacgagcucacccgccacuaccgcaagcacaccggcgccaagcccuuccagugcggcgucugcaaccgcuccuucucccgcuccgaccaccucgcccuccacaugaagcgccaccagaacuga

SEQ ID NO: 9943 - RNA, 1353 nt, Artificial Sequence
  derived and/or modified sequence opt3 from Klf5__Homo_sapiens__AER93391
auggccaccagagugcugagcauguccgcuaggcucggccccgucccucagccaccggcaccccaagacgagccuguuuucgcccagcuuaagccagugcugggggcggcuaaccccgcccgggaugcagccuuguuuccuggagaagaguuaaaacacgcucaucaccgcccacaggcaccccagccugcccaaccaccggcuacagguccccgacugccuccagaagaccuaguacagacucguugcgagauggaaaaguaccucacgccccagcugccuccagugcccaucauuccggagcauaaaaaguauagaagggauucugccucagucguggaccaguucuuuaccgauacagagggccuuccuuacaguauaaauaugaacguuuuccugcccgacaucacucacuugcggaccgggcucuauaaaagccaacgcccaugugugacacauauuaagaccgaaccugucgcgaucuuuucccaccagucugagacuacagcacccccacccgccccuacccaggcucugccagaguucacgucgauuuuuagcagccaccagacugccgcaccggaagugaauaacaucuucauaaagcaagagcugcccaccccugaucuccauuuaaguguaccaacacagcagggacaccuguaccaacuuuugaauacucccgaccuggauaugccuuccucuaccaaccagacagcugccauggacacccuaaauguuagcauguccgcggccauggcaggccucaacacgcauacuucagcugugccacagacagccgucaaacaguuucaagguaugcccccgugcaccuauacuaugccuagucaguuccugccacagcaggcuacauacuuucccccuucacccccaucuuccgaaccugggucacccgauagacaagccgagaugcuucagaaucugaccccaccgccuagcuaugcagccacgaucgcuaguaaguuggcgauucacaaccccaaucucccaaccacacugcccgugaacucucagaauauccagccugugagguacaaccggcgcuccaauccagacuuagaaaaacgaaggauucacuacugugauuaucccggaugcacuaaggucuacaccaaaagcucgcaucugaaggcacaccucagaacacauacuggcgagaagccuuauaaauguaccugggaaggcugcgacuggcgguucgcccguucugacgagcuuacacgccacuacagaaagcauaccggggcuaaaccguuucaauguggaguuugcaacagguccuucucacggagugaucaccuggccuugcacaugaagcgacaucagaacuga

SEQ ID NO: 9944 - RNA, 1353 nt, Artificial Sequence
  derived and/or modified sequence opt4 from Klf5__Homo_sapiens__AER93391
auggccaccagagugcugagcaugagcgccagacugggccccgugccccagccccccgccccccaggacgagcccguguucgcccagcugaagcccgugcugggcgccgccaaccccgccagagacgccgcccuguuccccggcgaggagcugaagcacgcccaccacagaccccaggccccccagcccgcccagccccccgccaccggccccagacugccccccgaggaccuggugcagaccagaugcgagauggagaaguaccugaccccccagcugccccccgugcccaucauccccgagcacaagaaguacagaagagacagcgccagcgugguggaccaguucuucaccgacaccgagggccugcccuacagcaucaacaugaacguguuccugcccgacaucacccaccugagaaccggccuguacaagagccagagacccugcgugacccacaucaagaccgagcccguggccaucuucagccaccagagcgagaccaccgcccccccccccgcccccacccaggcccugcccgaguucaccagcaucuucagcagccaccagaccgccgcccccgaggugaacaacaucuucaucaagcaggagcugcccacccccgaccugcaccugagcgugcccacccagcagggccaccuguaccagcugcugaacacccccgaccuggacaugcccagcagcaccaaccagaccgccgccauggacacccugaacgugagcaugagcgccgccauggccggccugaacacccacaccagcgccgugccccagaccgccgugaagcaguuccagggcaugccccccugcaccuacaccaugcccagccaguuccugccccagcaggccaccuacuucccccccagcccccccagcagcgagcccggcagccccgacagacaggccgagaugcugcagaaccugacccccccccccagcuacgccgccaccaucgccagcaagcuggccauccacaaccccaaccugcccaccacccugcccgugaacagccagaacauccagcccgugagauacaacagaagaagcaaccccgaccuggagaagagaagaauccacuacugcgacuaccccggcugcaccaagguguacaccaagagcagccaccugaaggcccaccugagaacccacaccggcgagaagcccuacaagugcaccugggagggcugcgacuggagauucgccagaagcgacgagcugaccagacacuacagaaagcacaccggcgccaagcccuuccagugcggcgugugcaacagaagcuucagcagaagcgaccaccuggcccugcacaugaagagacaccagaacuga

SEQ ID NO: 9945 - RNA, 1353 nt, Artificial Sequence
  derived and/or modified sequence opt5 from Klf5__Homo_sapiens__AER93391
auggccaccagagugcugagcauguccgcucggcucggccccgucccucagccgcccgccccucaagacgagcccguuuucgcgcagcugaagccugugcuuggggcugccaaccccgcccgcgaugcugcccuguuuccuggagaagaacucaaacacgcucaucacagaccgcaggcgccccagccugcccaacccccugccacaggcccccggcugccgccugaagaccuugugcagacgcgcugcgagauggaaaaguaccugacaccccagcucccucccguccccaucauuccugagcauaaaaaguauagacgggauucugcuagcgugguugaccaguucuuuaccgauaccgaggggcugccguacuccaucaauaugaacguguuccugcccgacauuacacaccuccgcaccggacuguauaaaucucaaagaccuugugucacacauaucaagaccgaacccguggccauuuuuagccaccaguccgagacgaccgcuccucccccggccccuacacaggcgcuucccgaguucaccucuaucuuuagcucccaccagacagccgcuccugagguuaauaacaucuucauuaagcaagagcugcccaccccugaucuccaucugagcgugcccacgcagcagggccaccuuuaccaacugcucaauacaccggaccuggauaugccuucuuccaccaaccagacagccgcuauggacacccugaaugucagcaugucugccgccauggcugggcucaacacccauacauccgcggugccccagacggccgugaaacaguuucaaggaaugcccccuugcaccuauacaaugccgagccaguuccugccccagcaggcuaccuacuuuccucccucuccucccuccagcgaaccuggcucccccgaucggcaagccgagaugcuucagaaucugacaccgccucccucuuaugccgcuaccaucgccagcaagcucgcgauucacaacccuaaucugcccacgacacuuccggucaacucccagaauauccagccuguucgcuacaacagacggagcaaucccgaccuggaaaaacgccggauucacuacugugauuauccuggcugcaccaagguguacaccaaaucuucccaucucaaggcucaccugagaacacauaccggggagaagcccuauaaauguacaugggaaggaugcgacuggcgcuucgccagaagcgacgagcugacgcggcacuacagaaagcauaccggcgccaaacccuuucaauguggggugugcaaccgcucuuucagccgguccgaucaccucgcucugcacaugaagagacaucagaacuga

SEQ ID NO: 9946 - RNA, 1353 nt, Artificial Sequence
  derived and/or modified sequence opt6 from Klf5__Homo_sapiens__AER93391
auggcaacuagaguacuaucuaugucagcacgacuagguccaguaccucaaccaccugcaccccaagaugaacccguauuugcccaauuaaaaccaguauuaggagcagcaaacccugcaagagacgcagcacuauucccaggagaagaacuaaaacacgcacaccaucgaccacaagcaccacaaccugcacaaccccccgcaacaggaccaagacuuccaccagaagauuuaguacaaacaagaugugaaauggaaaaguaucuaacaccacaacuaccaccaguaccaauaauaccagaacacaaaaaauacagaagagacucagcaucaguagucgaucaauucuuuacagacacagaaggauuaccauacucaauaaacaugaacguauuuuuaccagacauaacacaccuuagaacaggacucuacaaaucacaacgaccauguguaacccacauaaaaacagaaccaguugcaauauucucccaccaaucagaaacaaccgcacccccaccagccccaacccaagcccuaccagaauucacaucaauauucucuucacaucaaacugcagcaccagaaguaaacaacauauucauaaaacaagaacuacccacaccugauuuacaucuaaguguacccacacaacaaggacaccuauaucaauuacucaacacaccagaccucgauaugccaucaucaacuaaucaaacugcagcaauggacacacucaacguuucaaugucagcagccauggcuggucuuaacacccauacaucagcgguaccccaaacagcaguaaaacaauuucaaggaaugccaccaugcacauacacaaugccaucucaauuucuaccccaacaagcuacauacuuccccccaucaccaccauccucagaaccaggaucaccagaccgacaagccgaaauguuacagaaucuaacuccaccaccaucauacgcagcaacaaucgccucaaaacuugcaauacauaaccccaaccuaccuacuacauuacccgucaacucacaaaacauccaaccaguccgauacaacagaagaucaaauccugaccuagaaaaaagacgcauacacuauugcgacuaccccggcugcaccaaaguauacacaaaaucuucccaccuuaaagcacacuuaagaacacacaccggagaaaaaccauauaaaugcacaugggaaggaugcgacuggagauuugcacgauccgacgaacuaacucgucauuacagaaaacauacuggcgccaaacccuuucaaugcggaguaugcaaccgauccuucucaagaucagaucaucuagcauuacacaugaaaagacaccaaaacuaa

SEQ ID NO: 9947 - protein, 457 aa, Artificial Sequence
  Klf5__Homo_sapiens__Q13887
MATRVLSMSARLGPVPQPPAPQDEPVFAQLKPVLGAANPARDAALFPGEELKHAHHRPQAQPAPAQAPQPAQPPATGPRLPPEDLVQTRCEMEKYLTPQLPPVPIIPEHKKYRRDSASVVDQFFTDTEGLPYSINMNVFLPDITHLRTGLYKSQRPCVTHIKTEPVAIFSHQSETTAPPPAPTQALPEFTSIFSSHQTAAPEVNNIFIKQELPTPDLHLSVPTQQGHLYQLLNTPDLDMPSSTNQTAAMDTLNVSMSAAMAGLNTHTSAVPQTAVKQFQGMPPCTYTMPSQFLPQQATYFPPSPPSSEPGSPDRQAEMLQNLTPPPSYAATIASKLAIHNPNLPTTLPVNSQNIQPVRYNRRSNPDLEKRRIHYCDYPGCTKVYTKSSHLKAHLRTHTGEKPYKCTWEGCDWRFARSDELTRHYRKHTGAKPFQCGVCNRSFSRSDHLALHMKRHQN

SEQ ID NO: 9948 - RNA, 1374 nt, Artificial Sequence
  Klf5__Homo_sapiens__AAF18307
auggcuacaagggugcugagcaugagcgcccgccugggacccgugccccagccgccggcgccgcaggacgagccgguguucgcgcagcucaagccggugcugggcgccgcgaauccggcccgcgacgcggcgcucuuccccggcgaggagcugaagcacgcgcaccaccgcccgcaggcgcagcccgcgcccgcgcaggccccgcagccggcccagccgcccgccaccggcccgcggcugccuccagaggaccugguccaaacaagaugugaaauggagaaguaucugacaccucagcuuccuccaguuccuauaauuccagagcauaaaaaguauagacgagacagugccucagucguagaccaguucuucacugacacugaaggguuaccuuacaguaucaacaugaacgucuuccucccugacaucacucaccugagaacuggccucuacaaaucccagagaccgugcguaacacacaucaagacagaaccuguugccauuuucagccaccagagugaaacgacugccccuccuccggccccgacccaggcccucccugaguucaccaguauauucagcucacaccagaccgcagcuccagaggugaacaauauuuucaucaaacaagaacuuccuacaccagaucuucaucuuucugucccuacccagcagggccaccuguaccagcuacugaauacaccggaucuagauaugcccaguucuacaaaucagacagcagcaauggacacucuuaauguuucuaugucagcugccauggcaggccuuaacacacacaccucugcuguuccgcagacugcagugaaacaauuccagggcaugcccccuugcacauacacaaugccaagucaguuucuuccacaacaggccacuuacuuucccccgucaccaccaagcucagagccuggaaguccagauagacaagcagagaugcuccagaauuuaaccccaccuccauccuaugcugcuacaauugcuucuaaacuggcaauucacaauccaaauuuacccaccacccugccaguuaacucacaaaacauccaaccugucagauacaauagaaggaguaaccccgauuuggagaaacgacgcauccacuacugcgauuacccugguugcacaaaaguuuauaccaagucuucucauuuaaaagcucaccugaggacucacacuggugaaaagccauacaaguguaccugggaaggcugcgacuggagguucgcgcgaucggaugagcugacccgccacuaccggaagcacacaggcgccaagcccuuccagugcggggugugcaaccgcagcuucucgcgcucugaccaccuggcccugcauaugaagaggcaccagaacuga

SEQ ID NO: 9949 - RNA, 1374 nt, Artificial Sequence
  derived and/or modified sequence opt1 from Klf5__Homo_sapiens__AAF18307
auggccacccgcgugcugagcauguccgcccggcucggccccgucccgcagccgcccgcgccccaggacgagcccguguucgcccagcugaagcccgugcugggggccgccaaccccgcccgcgacgcggcccucuuccccggcgaggagcugaagcacgcccaccaccggccgcaggcccagcccgcgcccgcccaggcgccccagccggcccagccgcccgccaccgggccccgccugccgcccgaggaccucguccagacgcggugcgagauggagaaguaccugacgccccagcugccgcccgugcccaucauccccgagcacaagaaguaccgccgggacagcgccuccguggucgaccaguucuucaccgacaccgagggccuccccuacagcaucaacaugaacguguuccugcccgacaucacccaccuccgcaccgggcuguacaagucccagcggcccugcgugacccacaucaagaccgagcccgucgccaucuucagccaccaguccgagacgaccgcgcccccgcccgcccccacccaggcccugccggaguucaccagcaucuucuccagccaccagacggccgcccccgaggugaacaacaucuucaucaagcaggagcugcccacccccgaccuccaccuguccgugccgacccagcagggccaccuguaccagcuccugaacacccccgaccuggacaugcccagcuccacgaaccagaccgccgccauggacacccucaacgucagcauguccgccgcgauggccggccugaacacccacacgagcgccgugccccagaccgccgugaagcaguuccaggggaugccgcccugcaccuacaccaugcccucccaguuccugccccagcaggccacguacuucccgcccagcccgcccuccagcgagcccggcagccccgaccgccaggcggagaugcuccagaaccugaccccgccgcccuccuacgccgccaccaucgccagcaagcuggcgauccacaaccccaaccuccccaccacgcugcccgucaacucccagaacauccagcccgugcgguacaaccgccggagcaaccccgaccuggagaagcgccggauccacuacugcgacuaccccgggugcaccaagguguacaccaaguccagccaccucaaggcccaccuccgcacccacacgggcgagaagccguacaagugcaccugggaggggugcgacuggcgguucgcccgcuccgacgagcugacccggcacuaccgcaagcacaccggcgccaagcccuuccagugcggcgucugcaaccggagcuucucccgcagcgaccaccuggcccugcacaugaagcgccaccagaacuga

SEQ ID NO: 9950 - RNA, 1374 nt, Artificial Sequence
  derived and/or modified sequence opt2 from Klf5__Homo_sapiens__AAF18307
auggccacccgcguccucuccauguccgcccgccucggccccgucccccagccccccgccccccaggacgagcccgucuucgcccagcucaagcccguccucggcgccgccaaccccgcccgcgacgccgcccucuuccccggcgaggagcucaagcacgcccaccaccgcccccaggcccagcccgcccccgcccaggccccccagcccgcccagccccccgccaccggcccccgccucccccccgaggaccucguccagacccgcugcgagauggagaaguaccucaccccccagcucccccccguccccaucauccccgagcacaagaaguaccgccgcgacuccgccuccgucgucgaccaguucuucaccgacaccgagggccuccccuacuccaucaacaugaacgucuuccuccccgacaucacccaccuccgcaccggccucuacaagucccagcgccccugcgucacccacaucaagaccgagcccgucgccaucuucucccaccaguccgagaccaccgcccccccccccgcccccacccaggcccuccccgaguucaccuccaucuucuccucccaccagaccgccgcccccgaggucaacaacaucuucaucaagcaggagcuccccacccccgaccuccaccucuccguccccacccagcagggccaccucuaccagcuccucaacacccccgaccucgacaugcccuccuccaccaaccagaccgccgccauggacacccucaacgucuccauguccgccgccauggccggccucaacacccacaccuccgccgucccccagaccgccgucaagcaguuccagggcaugccccccugcaccuacaccaugcccucccaguuccucccccagcaggccaccuacuucccccccuccccccccuccuccgagcccggcucccccgaccgccaggccgagaugcuccagaaccucacccccccccccuccuacgccgccaccaucgccuccaagcucgccauccacaaccccaaccuccccaccacccuccccgucaacucccagaacauccagcccguccgcuacaaccgccgcuccaaccccgaccucgagaagcgccgcauccacuacugcgacuaccccggcugcaccaaggucuacaccaaguccucccaccucaaggcccaccuccgcacccacaccggcgagaagcccuacaagugcaccugggagggcugcgacuggcgcuucgcccgcuccgacgagcucacccgccacuaccgcaagcacaccggcgccaagcccuuccagugcggcgucugcaaccgcuccuucucccgcuccgaccaccucgcccuccacaugaagcgccaccagaacuga

SEQ ID NO: 9951 - RNA, 1374 nt, Artificial Sequence
  derived and/or modified sequence opt3 from Klf5__Homo_sapiens__AAF18307
auggccaccagagugcugagcauguccgcuaggcucggccccgucccucagccaccggcaccccaagacgagccuguuuucgcccagcuuaagccagugcugggggcggcuaaccccgcccgggaugcagccuuguuuccuggagaagaguuaaaacacgcucaucaccgcccacaggcacagcccgccccugcucaagccccacagccggcgcagcccccugcaacagguccacgacugcccccugaagaccuaguacagacucguugcgagauggaaaaguaccucacgccacaacugcccccggugccuaucauucccgagcauaaaaaguauagaagggauucugccucagucguggaccaguucuuuaccgauacagagggccuuccauacaguauaaauaugaacguuuuccugccugacaucacucacuugcggaccgggcucuauaaaagccagcgccccugugugacacauauuaagaccgaaccagucgcuaucuuuucccaccagucugagacuacagcacccccuccagccccgacccaagcucugcccgaauuuacgucgauuuucucaagccaccagacugccgcgccugaggugaauaacaucuucauaaagcaggagcugccaacccccgaucuccauuuaaguguaccuacacaacagggacaccuguaccagcuuuugaauacuccagaccuggauaugcccuccucuaccaaccagacagccgcaauggacacccuaaauguuagcauguccgcugccauggcuggccucaacacgcauacuucagccgugccgcaaacagcagucaaacaguuucaggguaugccuccaugcaccuauacuaugcccagucaguuccugccucaacaggccacauacuuucccccaagcccucccucuuccgaaccagggucaccggauagacaggcugagaugcuucagaaucugaccccucccccaagcuaugcggcaacgaucgccaguaaguuggcuauucacaaccccaaucucccuaccacacugccagugaacucucaaaauauccagcccgugagguacaaccggcgcuccaauccugacuuagaaaaacgaaggauucacuacugugauuauccgggaugcacuaaggucuacaccaaaagcucgcaucugaaggcccaccucagaacacauacuggcgagaagccauauaaauguaccugggaaggcugcgacuggcgguucgcacguucugacgagcuuacacgccacuacagaaagcauaccggggccaaacccuuucaguguggaguuugcaacagguccuucucacggagugaucaccuggcuuugcacaugaagcgacaucagaacuga

SEQ ID NO: 9952 - RNA, 1374 nt, Artificial Sequence
  derived and/or modified sequence opt4 from Klf5__Homo_sapiens__AAF18307
auggccaccagagugcugagcaugagcgccagacugggccccgugccccagccccccgccccccaggacgagcccguguucgcccagcugaagcccgugcugggcgccgccaaccccgccagagacgccgcccuguuccccggcgaggagcugaagcacgcccaccacagaccccaggcccagcccgcccccgcccaggccccccagcccgcccagccccccgccaccggccccagacugccccccgaggaccuggugcagaccagaugcgagauggagaaguaccugaccccccagcugccccccgugcccaucauccccgagcacaagaaguacagaagagacagcgccagcgugguggaccaguucuucaccgacaccgagggccugcccuacagcaucaacaugaacguguuccugcccgacaucacccaccugagaaccggccuguacaagagccagagacccugcgugacccacaucaagaccgagcccguggccaucuucagccaccagagcgagaccaccgcccccccccccgcccccacccaggcccugcccgaguucaccagcaucuucagcagccaccagaccgccgcccccgaggugaacaacaucuucaucaagcaggagcugcccacccccgaccugcaccugagcgugcccacccagcagggccaccuguaccagcugcugaacacccccgaccuggacaugcccagcagcaccaaccagaccgccgccauggacacccugaacgugagcaugagcgccgccauggccggccugaacacccacaccagcgccgugccccagaccgccgugaagcaguuccagggcaugccccccugcaccuacaccaugcccagccaguuccugccccagcaggccaccuacuucccccccagcccccccagcagcgagcccggcagccccgacagacaggccgagaugcugcagaaccugacccccccccccagcuacgccgccaccaucgccagcaagcuggccauccacaaccccaaccugcccaccacccugcccgugaacagccagaacauccagcccgugagauacaacagaagaagcaaccccgaccuggagaagagaagaauccacuacugcgacuaccccggcugcaccaagguguacaccaagagcagccaccugaaggcccaccugagaacccacaccggcgagaagcccuacaagugcaccugggagggcugcgacuggagauucgccagaagcgacgagcugaccagacacuacagaaagcacaccggcgccaagcccuuccagugcggcgugugcaacagaagcuucagcagaagcgaccaccuggcccugcacaugaagagacaccagaacuga

SEQ ID NO: 9953 - RNA, 1374 nt, Artificial Sequence
  derived and/or modified sequence opt5 from Klf5__Homo_sapiens__AAF18307
auggccaccagagugcugagcauguccgcucggcucggccccgucccucagccgcccgccccucaagacgagcccguuuucgcgcagcugaagccugugcuuggggcugccaaccccgcccgcgaugcugcccuguuuccuggagaagaacucaaacacgcucaucacagaccgcaggcccagcccgcgccugcccaagcuccccagccugcccagcccccggcuacaggcccucggcugcccccugaagaccuugugcagacgcgcugcgagauggaaaaguaccugacaccccaacugcccccugucccgaucauucccgagcauaaaaaguauagacgggauucugccagcgugguugaccaguucuuuaccgauaccgaggggcugccuuacuccaucaauaugaacguguuccugcccgacauuacacaccuccgcaccggacuguauaaaucucagagaccuugugucacacauaucaagaccgaacccguggcgauuuuuagccaccaguccgagacgaccgccccgccucccgcuccuacacaagcccuucccgaguucaccucuaucuuuagcucccaccagacagcugccccugagguuaauaacaucuucauuaagcaggagcugcccaccccggaucuccaucugagcgugccuacgcaacagggccaccuuuaccagcugcucaauacacccgaccuggauaugcccucuuccaccaaccagacagccgcuauggacacccugaaugucagcaugucugcggccauggcugggcucaacacccauacauccgccgugccucaaacggccgugaaacaguuucagggaaugccgcccugcaccuauacaaugccuagccaguuccugccccaacaggcuaccuacuuuccucccucuccucccuccagcgaaccgggcuccccugaucggcaggccgagaugcuucagaaucugacacccccucccucuuaugcggcuaccaucgccagcaagcucgccauucacaacccgaaucugccuacgacacuucccgucaacucccaaaauauccagccuguucgcuacaacagacggagcaaucccgaccuggaaaaacgccggauucacuacugugauuaucccggcugcaccaagguguacaccaaaucuucccaucucaaggcucaccucagaacacauaccggggagaagccuuauaaauguacaugggaaggaugcgacuggcgcuucgccagaagcgacgagcugacgcggcacuacagaaagcauaccggcgcuaaaccguuucaguguggggugugcaaccgcucuuucagccgguccgaucaccucgcccugcacaugaagagacaucagaacuga

SEQ ID NO: 9954 - RNA, 1374 nt, Artificial Sequence
  derived and/or modified sequence opt6 from Klf5__Homo_sapiens__AAF18307
auggcuaccagaguacuaucaaugucagcaagauuaggacccguuccacaaccaccagcaccacaagacgaaccaguauucgcacaauuaaaaccaguacuaggagcagccaacccagcaagagacgcagccuuauucccaggcgaagaacuaaaacaugcacaucaccgaccacaagcucaacccgcaccagcccaagccccacaaccagcacaaccaccagcaaccggaccaagacuaccaccagaagaccuaguacaaacacgcugcgaaauggaaaaauaccuaacaccacaacuaccaccaguuccaauaauaccagaacauaaaaaauaccguagagauuccgcaucaguaguagaccaauuuuucacagacacagaaggccuaccauacuccauaaauaugaauguauucuuaccagacauaacacacuuacgaacaggccuauauaaaucacaaagacccugcguuacacacauuaaaacagaaccuguagcaauauucucacaccaaucagaaaccacagccccaccuccagcaccaacacaagcacuaccagaauuuacaucuauauucuccucucaucaaaccgcagcuccagaaguuaacaacaucuucauaaaacaagaacuaccaacuccagaccuacaccuaucagucccaacacaacaaggacaccuauaucaacuacuuaacacuccagaccucgacaugccauccucaacaaaucaaacugccgcaauggauacuuuaaacguaucaauguccgcugccauggcaggccuaaacacucacacaucagcaguuccacaaacagccguaaaacaauuccaaggaaugccacccugcaccuacacuaugcccucacaauuuuuaccacaacaagcaacauacuucccccccagcccaccauccucugaaccaggauccccagacagacaagcagaaaugcuccaaaaccuuacuccaccacccucuuaugcagcaacaauagcuucaaaacuugcaauccacaauccaaaucucccaacuacacuuccaguaaacucccaaaauauccaaccaguaagauauaacagaagaucaaauccagaccuggaaaaaagaagaauacacuacugcgacuauccaggcugcacaaaagucuacacaaaaucaucacaccuaaaagcacaccuaagaacacauaccggcgaaaaaccauacaaauguacaugggaaggcugugacuggagauucgcaagaucagacgaacuaacucgacauuaccgcaaacacacuggagcaaaaccauuucaauguggaguaugcaacagauccuucucacguucagaucauuuagcacuccacaugaaaagacaccaaaacuaa

SEQ ID NO: 9955 - protein, 457 aa, Artificial Sequence; identical to SEQ ID NO: 9947
  Klf5__Homo_sapiens__Q5T6X2

SEQ ID NO: 9956 - RNA, 1374 nt, Artificial Sequence
  Klf5__Homo_sapiens__AAP35287
auggcuacaagggugcugagcaugagcgcccgccugggacccgugccccagccgccggcgccgcaggacgagccgguguucgcgcagcucaagccggugcugggcgccgcgaauccggcccgcgacgcggcgcucuuccccggcgaggagcugaagcacgcgcaccaccgcccgcaggcgcagcccgcgcccgcgcaggccccgcagccggcccagccgcccgccaccggcccgcggcugccuccagaggaccugguccagacaagaugugaaauggagaaguaucugacaccucagcuuccuccaguuccuauaauuccagagcauaaaaaguauagacgagacagugccucagucguagaccaguucuucacugacacugaaggguuaccuuacaguaucaacaugaacgucuuccucccugacaucacucaccugagaacuggccucuacaaaucccagagaccgugcguaacacacaucaagacagaaccuguugccauuuucagccaccagagugaaacgacugccccuccuccggccccgacccaggcccucccugaguucaccaguauauucagcucacaccagaccgcagcuccagaggugaacaauauuuucaucaaacaagaacuuccuacaccagaucuucaucuuucugucccuacccagcagggccaccuguaccagcuacugaauacaccggaucuagauaugcccaguucuacaaaucagacagcagcaauggacacucuuaauguuucuaugucagcugccauggcaggccuuaacacacacaccucugcuguuccgcagacugcagugaaacaauuccagggcaugcccccuugcacauacacaaugccaagucaguuucuuccacaacaggccacuuacuuucccccgucaccaccaagcucagagccuggaaguccagauagacaagcagagaugcuccagaauuuaaccccaccuccauccuaugcugcuacaauugcuucuaaacuggcaauucacaauccaaauuuacccaccacccugccaguuaacucacaaaacauccaaccugucagauacaauagaaggaguaaccccgauuuggagaaacgacgcauccacuacugcgauuacccugguugcacaaaaguuuauaccaagucuucucauuuaaaagcucaccugaggacucacacuggugaaaagccauacaaguguaccugggaaggcugcgacuggagguucgcgcgaucggaugagcugacccgccacuaccggaagcacacaggcgccaagcccuuccagugcggggugugcaaccgcagcuucucgcgcucugaccaccuggcccugcauaugaagaggcaccagaacuag

SEQ ID NO: 9957 - RNA, 1374 nt, Artificial Sequence; identical to SEQ ID NO: 9949
  derived and/or modified sequence opt1 from Klf5__Homo_sapiens__AAP35287

SEQ ID NO: 9958 - RNA, 1374 nt, Artificial Sequence; identical to SEQ ID NO: 9950
  derived and/or modified sequence opt2 from Klf5__Homo_sapiens__AAP35287

SEQ ID NO: 9959 - RNA, 1374 nt, Artificial Sequence; identical to SEQ ID NO: 9951
  derived and/or modified sequence opt3 from Klf5__Homo_sapiens__AAP35287

SEQ ID NO: 9960 - RNA, 1374 nt, Artificial Sequence; identical to SEQ ID NO: 9952
  derived and/or modified sequence opt4 from Klf5__Homo_sapiens__AAP35287

SEQ ID NO: 9961 - RNA, 1374 nt, Artificial Sequence; identical to SEQ ID NO: 9953
  derived and/or modified sequence opt5 from Klf5__Homo_sapiens__AAP35287

SEQ ID NO: 9962 - RNA, 1374 nt, Artificial Sequence
  derived and/or modified sequence opt6 from Klf5__Homo_sapiens__AAP35287
auggcaacaagaguccucuccaugucagcaagacuaggacccguaccccaacccccagccccacaagacgaaccaguauucgcacaacuaaaacccguccuaggugcagcaaacccagcucgagaugccgccuuauucccaggugaagaauuaaaacacgcacaucaccgaccacaagcucaaccugcaccagcacaagcaccacaacccgcacaaccccccgcaacaggcccccgacuaccucccgaagaccucguacaaaccagaugcgaaauggaaaaauaccuaaccccccaacuaccucccguuccuauaauccccgaacacaaaaaauacagaagagacucagcaucaguuguugaucaauucuuuacagacaccgaaggacuacccuauucuaucaauaugaacgucuuucuuccagauauaacucauuuaagaacagguuuauacaaaucacaacgacccugcguuacccacauuaaaacagaacccguagcaauauucucacaccaaucagaaacaaccgcaccacccccagcaccaacacaagcauuaccagaauucacauccauuuuuuccucucaucaaaccgccgccccagaaguaaacaacauauucauaaaacaagaauuaccaacuccagaucuacaccuauccguaccaacccaacaaggacacuuauaucaacuacuaaacacaccagaccuugacaugccauccucuacuaaucaaacagccgcaauggacacacuaaacguaucaaugucugccgcaauggcaggacuaaauacccacacauccgcaguaccacaaaccgcuguaaaacaauuucaaggaaugccacccugcaccuauacaaugccaucacaauuccuuccacaacaagcaaccuacuucccaccaucaccuccauccucagaaccaggaucaccagaccgacaagcagaaaugcuccaaaaccucacccccccacccuccuacgccgcaacaauagccucaaaacuagcaauccacaaccccaaccuucccacaaccuuacccguaaacucccaaaacauucaaccaguacgcuacaaccgaagaucaaaucccgaccuagaaaaaagaagaauacacuacugugacuacccagguuguacuaaaguauauacaaaaucgucacaccuaaaagcacauuuacgaacacauaccggagaaaaaccuuacaaaugcacaugggaagguugugauuggagauucgcucgauccgaugaacuaacaagacacuaccgaaaacacacaggcgcaaaaccauuccaaugcggcguaugcaacagaucauucucaagauccgaucaccuugcacuucacaugaaacgacaccaaaacuaa

SEQ ID NO: 9963 - protein, 209 aa, Artificial Sequence
  LIN28__Homo_sapiens__Q9H9Z2
MGSVSNQQFAGGCAKAAEEAPEEAPEDAARAADEPQLLHGAGICKWFNVRMGFGFLSMTARAGVALDPPVDVFVHQSKLHMEGFRSLKEGEAVEFTFKKSAKGLESIRVTGPGGVFCIGSERRPKGKSMQKRRSKGDRCYNCGGLDHHAKECKLPPQPKKCHFCQSISHMVASCPLKAQQGPSAQGKPTYFREEEEEIHSPTLLPEAQN

SEQ ID NO: 9964 - RNA, 630 nt, Artificial Sequence
  LIN28__Homo_sapiens__AAH28566
augggcuccguguccaaccagcaguuugcagguggcugcgccaaggcggcagaagaggcgcccgaggaggcgccggaggacgcggcccgggcggcggacgagccucagcugcugcacggugcgggcaucuguaagugguucaacgugcgcaugggguucggcuuccuguccaugaccgcccgcgccggggucgcgcucgaccccccaguggaugucuuugugcaccagaguaagcugcacauggaaggguuccggagcuugaaggagggugaggcaguggaguucaccuuuaagaagucagccaagggucuggaauccauccgugucaccggaccugguggaguauucuguauugggagugagaggcggccaaaaggaaagagcaugcagaagcgcagaucaaaaggagacaggugcuacaacuguggaggucuagaucaucaugccaaggaaugcaagcugccaccccagcccaagaagugccacuucugccagagcaucagccauaugguagccucauguccgcugaaggcccagcagggcccuagugcacagggaaagccaaccuacuuucgagaggaagaagaagaaauccacagcccuacccugcucccggaggcacagaauuga

SEQ ID NO: 9965 - RNA, 630 nt, Artificial Sequence
  derived and/or modified sequence opt1 from LIN28__Homo_sapiens__AAH28566
augggcagcguguccaaccagcaguucgccgggggcugcgccaaggcggccgaggaggcccccgaggaggccccggaggacgccgcgcgcgccgccgacgagccccagcugcuccacggggccggcaucugcaagugguucaacguccggaugggguucggcuuccugagcaugaccgcgcgcgccggcguggcccuggacccgcccguggacgucuucgugcaccaguccaagcuccacauggagggguuccggagccugaaggagggcgaggccguggaguucaccuucaagaaguccgccaaggggcuggagagcauccgcgucacgggccccgggggcguguucugcaucggcuccgagcggcgccccaagggcaagagcaugcagaagcggcgcuccaagggggaccggugcuacaacugcgggggccucgaccaccacgcgaaggagugcaagcugccgccccagcccaagaagugccacuucugccagagcaucucccacaugguggccagcugcccccugaaggcccagcagggccccuccgcccaggggaagcccaccuacuuccgcgaggaggaggaggagauccacagcccgacccuccugcccgaggcccagaacuga

SEQ ID NO: 9966 - RNA, 630 nt, Artificial Sequence
  derived and/or modified sequence opt2 from LIN28__Homo_sapiens__AAH28566
augggcuccgucuccaaccagcaguucgccggcggcugcgccaaggccgccgaggaggcccccgaggaggcccccgaggacgccgcccgcgccgccgacgagccccagcuccuccacggcgccggcaucugcaagugguucaacguccgcaugggcuucggcuuccucuccaugaccgcccgcgccggcgucgcccucgacccccccgucgacgucuucguccaccaguccaagcuccacauggagggcuuccgcucccucaaggagggcgaggccgucgaguucaccuucaagaaguccgccaagggccucgaguccauccgcgucaccggccccggcggcgucuucugcaucggcuccgagcgccgccccaagggcaaguccaugcagaagcgccgcuccaagggcgaccgcugcuacaacugcggcggccucgaccaccacgccaaggagugcaagcuccccccccagcccaagaagugccacuucugccaguccaucucccacauggucgccuccugcccccucaaggcccagcagggccccuccgcccagggcaagcccaccuacuuccgcgaggaggaggaggagauccacucccccacccuccuccccgaggcccagaacuga

SEQ ID NO: 9967 - RNA, 630 nt, Artificial Sequence
  derived and/or modified sequence opt3 from LIN28__Homo_sapiens__AAH28566
augggcagcguguccaaccagcaauucgccgggggaugcgcuaaggcagccgaggaagcgcccgaggaagcuccugaggacgccgcaagagccgcugaugaaccacagcugcuccacggugcaggcaucuguaaaugguuuaaugucaggaugggguucggauuucuuucuaugaccgcccgggcuggcguugcccuggacccgcccguggauguauucgugcaucagucaaaguugcacauggaggguuuucgcaguuuaaaagagggggaagcggucgaguucacauuuaagaaaagcgcaaagggacuggaauccauucgagugacuggcccuggcgggguuuucugcauaggaucugagcguagaccaaaggguaaaucgaugcagaagaggcggucaaaaggcgaccgcuguuacaacugcgggggacuagaucaucacgccaaggaguguaaacugcccccucaaccaaagaagugccauuuuugucagagcaucagucacaugguggcuuccugcccccucaaagcccagcagggcccuucugcacaagguaagccaacguauuucagagaagaggaagaggaaauucacagcccgacccuucugcccgaggcucagaauuga

SEQ ID NO: 9968 - RNA, 630 nt, Artificial Sequence
  derived and/or modified sequence opt4 from LIN28__Homo_sapiens__AAH28566
augggcagcgugagcaaccagcaguucgccggcggcugcgccaaggccgccgaggaggcccccgaggaggcccccgaggacgccgccagagccgccgacgagccccagcugcugcacggcgccggcaucugcaagugguucaacgugagaaugggcuucggcuuccugagcaugaccgccagagccggcguggcccuggacccccccguggacguguucgugcaccagagcaagcugcacauggagggcuucagaagccugaaggagggcgaggccguggaguucaccuucaagaagagcgccaagggccuggagagcaucagagugaccggccccggcggcguguucugcaucggcagcgagagaagacccaagggcaagagcaugcagaagagaagaagcaagggcgacagaugcuacaacugcggcggccuggaccaccacgccaaggagugcaagcugcccccccagcccaagaagugccacuucugccagagcaucagccacaugguggccagcugcccccugaaggcccagcagggccccagcgcccagggcaagcccaccuacuucagagaggaggaggaggagauccacagccccacccugcugcccgaggcccagaacuga

SEQ ID NO: 9969 - RNA, 630 nt, Artificial Sequence
  derived and/or modified sequence opt5 from LIN28__Homo_sapiens__AAH28566
augggcagcguguccaaccagcaauucgccgggggaugcgcuaaggccgcggaggaagcucccgaggaagccccugaggacgccgcuagagccgcugaugaaccgcagcugcuccacggcgccgggaucuguaaaugguuuaauguccggaugggauucggcuuucugucuaugaccgcgcgcgccgggguugcucuugaucccccuguggacguguucguccaucagagcaagcugcacauggagggauuuagaucccucaaagagggcgaagccguggaguucacauuuaagaaaucugcuaagggccuggaaagcauucggguuacggggcccggaggcguguucugcaucggguccgagcgcagaccuaagggaaaaucuaugcagaagcggcgcagcaaaggcgacagauguuacaacugcgggggacuugaucaucacgccaaggaguguaaacugcccccucaaccgaagaagugccauuuuugucaguccauuagccacauggucgcgucuugcccccucaaagcccagcagggcccuuccgcucaaggcaagcccaccuauuuccgggaagaggaagaggaaauccacagcccuacacugcugcccgaggcccagaauuga

SEQ ID NO: 9970 - RNA, 630 nt, Artificial Sequence
  derived and/or modified sequence opt6 from LIN28__Homo_sapiens__AAH28566
augggaucaguaucaaaucaacaauuugcaggaggaugugcaaaagcagcagaagaagcaccagaagaagcaccagaagaugcagcaagagcagcagaugaaccacaauuacuacauggagcaggaauaugcaaaugguuuaacguaagaaugggauuuggauuucuaucaaugacagcaagagcaggagucgcacuagauccaccaguagacguauuuguacaucaaaguaaauuacauauggaaggauucaggaguuuaaaagaaggagaagcaguagaauuuacauuuaaaaaaagcgcaaaaggacuagaaagcauaagaguuacaggaccaggaggaguauucuguauaggaagcgaaagaagaccaaaaggaaaaagcaugcaaaaaagaagaagcaaaggagauagauguuacaauugcggaggauuagaccaucacgcaaaagaaugcaaauuaccaccacaaccaaaaaaaugucacuuuugccaaaguauaagccacaugguagcaucaugcccauuaaaagcacaacaaggaccaucagcacaaggaaaaccaacauacuuuagagaagaagaagaagaaauacauagcccaacauuacuaccagaagcacaaaauuaa

SEQ ID NO: 9971 - protein, 139 aa, Artificial Sequence
  L-myc__Homo_sapiens__A0A0A0N0L0
MDYDSYQHYFYDYDCGEDFYRSTAPSEDIWKKFELVPSPPTSPPWGLGPGAGDPAPGIGPPEPWPGGCTGDEAESRGHSKGWGRNYASIIRRDCMWSGFSASKPATRRPPPPVRWANPRPRPAPGPRAQATRRMKKLML

SEQ ID NO: 9972 - RNA, 420 nt, Artificial Sequence
  L-myc__Homo_sapiens__AER93388
auggacuacgacucguaccagcacuauuucuacgacuaugacugcggggaggauuucuaccgcuccacggcgcccagcgaggacaucuggaagaaauucgagcuggugccaucgccccccacgucgccgcccuggggcuugggucccggcgcaggggacccggcccccgggauuggucccccggagccguggcccggagggugcaccggagacgaagcggaaucccggggccacucgaaaggcuggggcaggaacuacgccuccaucauacgccgugacugcauguggagcggcuucucagccucgaagccggcaacccggcgcccgccgcccccuguccgcugggcgaacccaagacccaggccugcuccggguccgagagcccaagcgacucggagaaugaagaaauugauguuguga

SEQ ID NO: 9973 - RNA, 420 nt, Artificial Sequence
  derived and/or modified sequence opt1 from L-myc__Homo_sapiens__AER93388
auggacuacgacagcuaccagcacuacuucuacgacuacgacugcggcgaggacuucuaccgcuccaccgcccccagcgaggacaucuggaagaaguucgagcuggugcccuccccgcccaccagcccgcccugggggcucggccccggggccggcgaccccgcgcccgggaucggcccgcccgagcccuggcccggcgggugcacgggcgacgaggccgagucccgggggcacagcaagggcugggggcgcaacuacgccuccaucauccggcgcgacugcauguggagcggcuucuccgccagcaagccggccacccggcgcccgcccccgcccguccggugggcgaacccccgcccccggcccgcccccggcccccgcgcccaggccacccggcgcaugaagaagcugaugcuguga

SEQ ID NO: 9974 - RNA, 420 nt, Artificial Sequence
  derived and/or modified sequence opt2 from L-myc__Homo_sapiens__AER93388
auggacuacgacuccuaccagcacuacuucuacgacuacgacugcggcgaggacuucuaccgcuccaccgcccccuccgaggacaucuggaagaaguucgagcucguccccuccccccccaccuccccccccuggggccucggccccggcgccggcgaccccgcccccggcaucggcccccccgagcccuggcccggcggcugcaccggcgacgaggccgagucccgcggccacuccaagggcuggggccgcaacuacgccuccaucauccgccgcgacugcaugugguccggcuucuccgccuccaagcccgccacccgccgcccccccccccccguccgcugggccaacccccgcccccgccccgcccccggcccccgcgcccaggccacccgccgcaugaagaagcucaugcucuga

SEQ ID NO: 9975 - RNA, 420 nt, Artificial Sequence
  derived and/or modified sequence opt3 from L-myc__Homo_sapiens__AER93388
auggacuacgauagcuaucagcacuacuucuaugacuacgauugcggcgaggacuuuuauagauccaccgcccccucugaagauaucuggaagaaauucgagcuggugccuucaccaccgacaagucccccuugggggcucggaccaggugcuggcgaccccgcaccugggauuggaccacccgaaccuuggccaggcgguuguacuggggaugaggccgaaagcaggggacauuccaagggcuggggccggaacuacgcgucuauaauccgccgagacugcauguggucgggguuuucagcuagcaaaccggccacgcguagacccccuccacccgucaggugggcaaauccucggccacgccccgccccgggaccuagagcucaagcaaccaggcggaugaagaaacuuaugcuguga

SEQ ID NO: 9976 - RNA, 420 nt, Artificial Sequence
  derived and/or modified sequence opt4 from L-myc__Homo_sapiens__AER93388
auggacuacgacagcuaccagcacuacuucuacgacuacgacugcggcgaggacuucuacagaagcaccgcccccagcgaggacaucuggaagaaguucgagcuggugcccagcccccccaccagcccccccuggggccugggccccggcgccggcgaccccgcccccggcaucggcccccccgagcccuggcccggcggcugcaccggcgacgaggccgagagcagaggccacagcaagggcuggggcagaaacuacgccagcaucaucagaagagacugcauguggagcggcuucagcgccagcaagcccgccaccagaagaccccccccccccgugagaugggccaaccccagacccagacccgcccccggccccagagcccaggccaccagaagaaugaagaagcugaugcuguga

SEQ ID NO: 9977 - RNA, 420 nt, Artificial Sequence
  derived and/or modified sequence opt5 from L-myc__Homo_sapiens__AER93388
auggacuacgauagcuaucagcacuacuucuaugacuacgauugcggcgaggacuuuuauagauccaccgcccccucugaagauaucuggaagaaauucgagcuggugccuagcccgcccacauccccucccugggggcucggaccuggcgcuggggaccccgccccuggaauuggcccgcccgaaccuuggcccgggggauguacgggcgaugaggcggaaucucggggccauagcaagggguggggacgcaacuacgcuuccaucauuagacgggacugcauguggucuggcuuuagcgccuccaaaccugccacccgcagacccccgccucccguccggugggcuaauccucgccccagacccgccccugggccgcgggcucaagccacacgcagaaugaagaaacugaugcuuuga

SEQ ID NO: 9978 - RNA, 420 nt, Artificial Sequence
  derived and/or modified sequence opt6 from L-myc__Homo_sapiens__AER93388
auggauuaugauucauaucaacauuauuuuuaugauuaugauuguggagaagauuuuuauagaaguacagcaccaagugaagauauauggaaaaaauuugaauuaguaccaaguccaccaacaagcccaccauggggacuaggaccaggagcaggagauccagcaccaggaauaggaccaccagaaccauggccaggaggauguacaggagaugaagcagaaucaagaggacauucaaaaggauggggaagaaauuaugcaaguauaauaagaagagauuguauguggucaggauuuagugcaaguaaaccagcaacaagaagaccaccaccaccaguaagaugggcaaauccaagaccaagaccagcaccaggaccaagagcacaagcaacaagaagaaugaaaaaauuaauguuauaa

SEQ ID NO: 9979 - protein, 305 aa, Artificial Sequence
  Nanog__Homo_sapiens__Q9H9S0
MSVDPACPQSLPCFEASDCKESSPMPVICGPEENYPSLQMSSAEMPHTETVSPLPSSMDLLIQDSPDSSTSPKGKQPTSAEKSVAKKEDKVPVKKQKTRTVFSSTQLCVLNDRFQRQKYLSLQQMQELSNILNLSYKQVKTWFQNQRMKSKRWQKNNWPKNSNGVTQKASAPTYPSLYSSYHQGCLVNPTGNLPMWSNQTWNNSTWSNQTQNIQSWSNHSWNTQTWCTQSWNNQAWNSPFYNCGEESLQSCMQFQPNSPASDLEAALEAAGEGLNVIQQTTRYFSTPQTMDLFLNYSMNMQPEDV

SEQ ID NO: 9980 - RNA, 918 nt, Artificial Sequence
  Nanog__Homo_sapiens__AAP49529
augaguguggauccagcuuguccccaaagcuugccuugcuuugaagcauccgacuguaaagaaucuucaccuaugccugugauuugugggccugaagaaaacuauccauccuugcaaaugucuucugcugagaugccucacacggagacugucucuccucuuccuuccuccauggaucugcuuauucaggacagcccugauucuuccaccagucccaaaggcaaacaacccacuucugcagagaagagugucgcaaaaaaggaagacaaggucccggucaagaaacagaagaccagaacuguguucucuuccacccagcuguguguacucaaugauagauuucagagacagaaauaccucagccuccagcagaugcaagaacucuccaacauccugaaccucagcuacaaacaggugaagaccugguuccagaaccagagaaugaaaucuaagagguggcagaaaaacaacuggccgaagaauagcaauggugugacgcagaaggccucagcaccuaccuaccccagccuuuacucuuccuaccaccagggaugccuggugaacccgacugggaaccuuccaauguggagcaaccagaccuggaacaauucaaccuggagcaaccagacccagaacauccaguccuggagcaaccacuccuggaacacucagaccuggugcacccaauccuggaacaaucaggccuggaacagucccuucuauaacuguggagaggaaucucugcaguccugcaugcaguuccagccaaauucuccugccagugacuuggaggcugccuuggaagcugcuggggaaggccuuaauguaauacagcagaccacuagguauuuuaguacuccacaaaccauggauuuauuccuaaacuacuccaugaacaugcaaccugaagacguguga

SEQ ID NO: 9981 - RNA, 918 nt, Artificial Sequence
  derived and/or modified sequence opt1 from Nanog__Homo_sapiens__AAP49529
augagcguggaccccgccugcccgcagucccugcccugcuucgaggccagcgacugcaaggaguccagccccaugcccgucaucugcggcccggaggagaacuaccccucccuccagaugagcuccgcggagaugccccacaccgagaccgugagcccccugccguccagcauggaccugcucauccaggacucccccgacagcuccaccagccccaaggggaagcagcccaccuccgccgagaaguccguggccaagaaggaggacaaggucccggugaagaagcagaagacccgcaccguguucagcagcacgcagcugugcguccugaacgaccgguuccagcgccagaaguaccucucccugcagcagaugcaggagcugagcaacauccucaaccugagcuacaagcaggucaagaccugguuccagaaccagcggaugaaguccaagcgcuggcagaagaacaacuggcccaagaacagcaacggcgugacccagaaggccuccgcccccaccuaccccagccuguacuccagcuaccaccaggggugccucgugaacccgacgggcaaccugcccaugugguccaaccagaccuggaacaacagcaccugguccaaccagacccagaacauccagagcugguccaaccacagcuggaacacgcagaccuggugcacccaguccuggaacaaccaggcguggaacagccccuucuacaacugcggggaggagucccugcagagcugcaugcaguuccagcccaacuccccggccagcgaccucgaggccgcccuggaggcggccggcgagggccugaacgugauccagcagaccacgcgguacuucuccacgccccagaccauggaccucuuccugaacuacagcaugaacaugcagcccgaggacguguga

SEQ ID NO: 9982 - RNA, 918 nt, Artificial Sequence
  derived and/or modified sequence opt2 from Nanog__Homo_sapiens__AAP49529
auguccgucgaccccgccugcccccagucccuccccugcuucgaggccuccgacugcaaggaguccucccccaugcccgucaucugcggccccgaggagaacuaccccucccuccagauguccuccgccgagaugccccacaccgagaccgucuccccccuccccuccuccauggaccuccucauccaggacucccccgacuccuccaccucccccaagggcaagcagcccaccuccgccgagaaguccgucgccaagaaggaggacaagguccccgucaagaagcagaagacccgcaccgucuucuccuccacccagcucugcguccucaacgaccgcuuccagcgccagaaguaccucucccuccagcagaugcaggagcucuccaacauccucaaccucuccuacaagcaggucaagaccugguuccagaaccagcgcaugaaguccaagcgcuggcagaagaacaacuggcccaagaacuccaacggcgucacccagaaggccuccgcccccaccuaccccucccucuacuccuccuaccaccagggcugccucgucaaccccaccggcaaccuccccaugugguccaaccagaccuggaacaacuccaccugguccaaccagacccagaacauccaguccugguccaaccacuccuggaacacccagaccuggugcacccaguccuggaacaaccaggccuggaacucccccuucuacaacugcggcgaggagucccuccaguccugcaugcaguuccagcccaacucccccgccuccgaccucgaggccgcccucgaggccgccggcgagggccucaacgucauccagcagaccacccgcuacuucuccaccccccagaccauggaccucuuccucaacuacuccaugaacaugcagcccgaggacgucuga

SEQ ID NO: 9983 - RNA, 918 nt, Artificial Sequence
  derived and/or modified sequence opt3 from Nanog__Homo_sapiens__AAP49529
augagcguggaccccgccugcccucagucccugccauguuucgaggcuucugauugcaaggaaucaaguccgaugcccgucaucuguggcccugaggaaaacuacccaagccuccaaauguccucugcagagaugccccacaccgaaacaguuucgccucuuccaucaagcauggaccuguugauucaggauagucccgacuccucuacuagcccuaaagggaagcagccaacguccgccgagaaaucaguggcgaagaaagaggauaagguaccggugaagaaacagaagaccagaacagucuuuaguagcacucaauuaugcgugcugaaugacagguuccagcggcagaaauaucuaucucuccagcaaaugcaggaacuguccaacauacuuaaucugucauacaagcagguuaaaaccugguuucagaaccaacgcaugaaaagcaagcgauggcagaaaaauaacuggcccaagaauaguaacggagugacacagaaggcuucugccccuaccuauccauccuuguacagcucguaucaucaagguugucucgucaaucccacuggcaaccugccuauguggucuaaucagacauggaacaauuccaccuggucaaaccagacgcagaauauccaaaguuggagcaaccacuccuggaacacucagaccuggugcacacagucuuggaauaaccaggcauggaauagcccauucuacaacuguggggaggaaucacugcaaaguugcaugcaguuucagcccaauuccccggccagcgaucucgaggcugcauuagaggccgcuggagaaggccugaacgugauucagcaaacuacccguuauuucucuacaccucagaccauggacuuguuucuuaauuacucaaugaacaugcagcccgaggauguauga

SEQ ID NO: 9984 - RNA, 918 nt, Artificial Sequence
  derived and/or modified sequence opt4 from Nanog__Homo_sapiens__AAP49529
augagcguggaccccgccugcccccagagccugcccugcuucgaggccagcgacugcaaggagagcagccccaugcccgugaucugcggccccgaggagaacuaccccagccugcagaugagcagcgccgagaugccccacaccgagaccgugagcccccugcccagcagcauggaccugcugauccaggacagccccgacagcagcaccagccccaagggcaagcagcccaccagcgccgagaagagcguggccaagaaggaggacaaggugcccgugaagaagcagaagaccagaaccguguucagcagcacccagcugugcgugcugaacgacagauuccagagacagaaguaccugagccugcagcagaugcaggagcugagcaacauccugaaccugagcuacaagcaggugaagaccugguuccagaaccagagaaugaagagcaagagauggcagaagaacaacuggcccaagaacagcaacggcgugacccagaaggccagcgcccccaccuaccccagccuguacagcagcuaccaccagggcugccuggugaaccccaccggcaaccugcccauguggagcaaccagaccuggaacaacagcaccuggagcaaccagacccagaacauccagagcuggagcaaccacagcuggaacacccagaccuggugcacccagagcuggaacaaccaggccuggaacagccccuucuacaacugcggcgaggagagccugcagagcugcaugcaguuccagcccaacagccccgccagcgaccuggaggccgcccuggaggccgccggcgagggccugaacgugauccagcagaccaccagauacuucagcaccccccagaccauggaccuguuccugaacuacagcaugaacaugcagcccgaggacguguga

SEQ ID NO: 9985 - RNA, 918 nt, Artificial Sequence
  derived and/or modified sequence opt5 from Nanog__Homo_sapiens__AAP49529
augagcguggaccccgccugcccucagucccugccguguuucgaggcuucugauugcaaggaaagcucccccaugccugucaucuguggccccgaggaaaacuacccuucucuccaaaugagcuccgccgagaugccccacaccgaaacaguuucuccucugccgagcuccauggaccuucugauucaggauagccccgacucuuccacgagcccuaaagggaagcagcccaccucugcggagaaauccguggcuaagaaagaggauaaggugccugucaagaaacagaagacaagaaccguguuuagcucuacacaacucugcguucugaaugaccgguuccagcgccagaaauaucuuucccugcagcaaaugcaggaacucagcaacauccugaaucuguccuacaaacaggugaagaccugguuucagaaccaaagaaugaagucuaagcgguggcagaaaaauaacuggcccaagaauagcaacggagucacacagaaagccuccgccccgaccuauccuagccucuacucuuccuaucaucaaggcugucuggugaaucccacggggaaccuuccuauguggagcaaucagaccuggaacaauucuacauggagcaaccagacccagaauauucaauccuggucuaaccacagcuggaacacacagaccuggugcacgcaguccuggaauaaccaggcuuggaauagccccuucuacaacuguggagaggaaucucugcaauccugcaugcaguuucagcccaauagcccugccucugaucucgaggcugcccuggaggcggccggcgaagggcuuaacguuauccagcaaacaacccgcuauuucuccacaccgcagaccauggaccuguuucucaauuacagcaugaacaugcagcccgaggauguguga

SEQ ID NO: 9986 - RNA, 918 nt, Artificial Sequence
  derived and/or modified sequence opt6 from Nanog__Homo_sapiens__AAP49529
augucagucgauccagcaugcccacaaucccucccaugcuucgaagcaucagauugcaaagaaucaucuccuaugcccguaauaugcggacccgaagaaaauuacccaucacuacaaaugucaucagcagaaaugccacacacagaaacaguaucaccucucccaucaucaauggaccuauuaauacaagacucaccagacucaucaacaucaccaaaaggaaaacaaccuacaucugcagaaaaaucaguagcaaaaaaagaagacaaaguaccaguaaaaaaacaaaaaacaagaacaguauucuccucaacccaacuaugcguacucaaugacagauuccaaagacaaaaauaccuaucacuacaacaaaugcaagaacuaucaaacauacucaaccuaucuuacaaacaaguaaaaacaugguuccaaaaccaacgaaugaaaucaaaaagauggcaaaaaaacaacuggccaaaaaacucuaacggaguaacucaaaaagcaucagcaccaaccuacccaucccuauacucaucuuaccaccaaggaugccuaguaaacccaacaggaaaccuaccaauguggucaaaccaaacauggaacaauucaacauggucaaaccaaacacaaaacauacaauccugguccaaccauucauggaacacacaaacauggugcacacaauccuggaacaaucaagcauggaacucaccauucuacaacugcggagaagaauccuuacaauccugcaugcaauuccaaccaaacuccccugcauccgacuuagaagcagcauuagaagcagcaggcgaaggauuaaacguaauacaacaaacuacaagauacuucucaacaccacaaacaauggaccuauuccuaaauuacucaaugaacaugcaaccagaagacgucuaa

SEQ ID NO: 9987 - protein, 464 aa, Artificial Sequence
  N-myc__Homo_sapiens__P04198
MPSCSTSTMPGMICKNPDLEFDSLQPCFYPDEDDFYFGGPDSTPPGEDIWKKFELLPTPPLSPSRGFAEHSSEPPSWVTEMLLENELWGSPAEEDAFGLGGLGGLTPNPVILQDCMWSGFSAREKLERAVSEKLQHGRGPPTAGSTAQSPGAGAASPAGRGHGGAAGAGRAGAALPAELAHPAAECVDPAVVFPFPVNKREPAPVPAAPASAPAAGPAVASGAGIAAPAGAPGVAPPRPGGRQTSGGDHKALSTSGEDTLSDSDDEDDEEEDEEEEIDVVTVEKRRSSSNTKAVTTFTITVRPKNAALGPGRAQSSELILKRCLPIHQQHNYAAPSPYVESEDAPPQKKIKSEASPRPLKSVIPPKAKSLSPRNSDSEDSERRRNHNILERQRRNDLRSSFLTLRDHVPELVKNEKAAKVVILKKATEYVHSLQAEEHQLLLEKEKLQARQQQLLKKIEHARTC

SEQ ID NO: 9988 - RNA, 1395 nt, Artificial Sequence
  N-myc__Homo_sapiens__AAH02712
augccgagcugcuccacguccaccaugccgggcaugaucugcaagaacccagaccucgaguuugacucgcuacagcccugcuucuacccggacgaagaugacuucuacuucggcggccccgacucgacccccccgggggaggacaucuggaagaaguuugagcugcugcccacgcccccgcugucgcccagccguggcuucgcggagcacagcuccgagcccccgagcugggucacggagaugcugcuugagaacgagcuguggggcagcccggccgaggaggacgcguucggccuggggggacuggguggccucacccccaacccggucauccuccaggacugcauguggagcggcuucuccgcccgcgagaagcuggagcgcgccgugagcgagaagcugcagcacggccgcgggccgccaaccgccgguuccaccgcccaguccccgggagccggcgccgccagcccugcgggucgcgggcacggcggggcugcgggagccggccgcgccggggccgcccugcccgccgagcucgcccacccggccgccgagugcguggaucccgccguggucuuccccuuucccgugaacaagcgcgagccagcgcccgugcccgcagccccggccagugccccggcggcgggcccugcggucgccucgggggcggguauugccgccccagccggggccccgggggucgccccuccgcgcccaggcggccgccagaccagcggcggcgaccacaaggcccucaguaccuccggagaggacacccugagcgauucagaugaugaagaugaugaagaggaagaugaagaggaagaaaucgacguggucacuguggagaagcggcguuccuccuccaacaccaaggcugucaccacauucaccaucacugugcgucccaagaacgcagcccugggucccgggagggcucaguccagcgagcugauccucaaacgaugccuucccauccaccagcagcacaacuaugccgcccccucucccuacguggagagugaggaugcacccccacagaagaagauaaagagcgaggcguccccacguccgcucaagagugucauccccccaaaggcuaagagcuugagcccccgaaacucugacucggaggacagugagcgucgcagaaaccacaacauccuggagcgccagcgccgcaacgaccuucgguccagcuuucucacgcucagggaccacgugccggaguugguaaagaaugagaaggccgccaagguggucauuuugaaaaaggccacugaguauguccacucccuccaggccgaggagcaccagcuuuugcuggaaaaggaaaaauugcaggcaagacagcagcaguugcuaaagaaaauugaacacgcucggacuugcuag

SEQ ID NO: 9989 - RNA, 1395 nt, Artificial Sequence
  derived and/or modified sequence opt1 from N-myc__Homo_sapiens__AAH02712
augcccagcugcuccaccagcaccaugccgggcaugaucugcaagaaccccgaccuggaguucgacucccuccagcccugcuucuaccccgacgaggacgacuucuacuucgggggcccggacagcacgccgcccggggaggacaucuggaagaaguucgagcugcugcccaccccgccccucucccccagccgcggcuucgccgagcacuccagcgagcccccguccugggugaccgagaugcugcuggagaacgagcucugggggagccccgccgaggaggacgcguucggccugggcgggcugggcgggcucacccccaaccccgucauccugcaggacugcaugugguccggcuucagcgcccgcgagaagcuggagcgcgccguguccgagaagcuccagcacgggcggggcccgcccacggccggcagcaccgcccagucccccggggcgggcgccgccagccccgccgggcgcggccacggcggggcggccggcgccgggcgggccggcgccgcgcugccggccgagcuggcccaccccgccgccgagugcguggaccccgcggucguguuccccuucccggugaacaagcgcgagcccgcccccguccccgccgccccggccuccgcgcccgccgccgggcccgccguggccagcggcgcgggcaucgccgccccggccggggcgcccggcguggccccgccccggcccgggggccgccagaccuccgggggcgaccacaaggcccucagcaccagcggcgaggacacgcuguccgacagcgacgacgaggacgacgaggaggaggacgaggaggaggagaucgacgucgugaccguggagaagcggcgcuccagcuccaacaccaaggccgucaccacguucaccaucaccgugcggcccaagaacgccgcgcuggggcccggccgcgcccagagcuccgagcucauccugaagcggugccugcccauccaccagcagcacaacuacgccgcccccagccccuacguggaguccgaggacgccccgccccagaagaagaucaagagcgaggcgagcccccgcccccucaaguccgucaucccgcccaaggccaagucccugagcccccggaacuccgacagcgaggacuccgagcgccggcgcaaccacaacauccuggagcggcagcgccggaacgaccuccgcagcuccuuccugacccugcgcgaccacgugcccgagcucgugaagaacgagaaggccgccaaggucgugauccugaagaaggccacggaguacgugcacagccugcaggcggaggagcaccagcuccugcuggagaaggagaagcuccaggcccggcagcagcagcugcugaagaagaucgagcacgcccggaccugcuga

SEQ ID NO: 9990 - RNA, 1395 nt, Artificial Sequence
  derived and/or modified sequence opt2 from N-myc__Homo_sapiens__AAH02712
augcccuccugcuccaccuccaccaugcccggcaugaucugcaagaaccccgaccucgaguucgacucccuccagcccugcuucuaccccgacgaggacgacuucuacuucggcggccccgacuccaccccccccggcgaggacaucuggaagaaguucgagcuccuccccacccccccccucucccccucccgcggcuucgccgagcacuccuccgagccccccuccugggucaccgagaugcuccucgagaacgagcucuggggcucccccgccgaggaggacgccuucggccucggcggccucggcggccucacccccaaccccgucauccuccaggacugcaugugguccggcuucuccgcccgcgagaagcucgagcgcgccgucuccgagaagcuccagcacggccgcggcccccccaccgccggcuccaccgcccagucccccggcgccggcgccgccucccccgccggccgcggccacggcggcgccgccggcgccggccgcgccggcgccgcccuccccgccgagcucgcccaccccgccgccgagugcgucgaccccgccgucgucuuccccuuccccgucaacaagcgcgagcccgcccccguccccgccgcccccgccuccgcccccgccgccggccccgccgucgccuccggcgccggcaucgccgcccccgccggcgcccccggcgucgcccccccccgccccggcggccgccagaccuccggcggcgaccacaaggcccucuccaccuccggcgaggacacccucuccgacuccgacgacgaggacgacgaggaggaggacgaggaggaggagaucgacgucgucaccgucgagaagcgccgcuccuccuccaacaccaaggccgucaccaccuucaccaucaccguccgccccaagaacgccgcccucggccccggccgcgcccaguccuccgagcucauccucaagcgcugccuccccauccaccagcagcacaacuacgccgcccccucccccuacgucgaguccgaggacgcccccccccagaagaagaucaaguccgaggccuccccccgcccccucaaguccgucaucccccccaaggccaagucccucuccccccgcaacuccgacuccgaggacuccgagcgccgccgcaaccacaacauccucgagcgccagcgccgcaacgaccuccgcuccuccuuccucacccuccgcgaccacguccccgagcucgucaagaacgagaaggccgccaaggucgucauccucaagaaggccaccgaguacguccacucccuccaggccgaggagcaccagcuccuccucgagaaggagaagcuccaggcccgccagcagcagcuccucaagaagaucgagcacgcccgcaccugcuga

SEQ ID NO: 9991 - RNA, 1395 nt, Artificial Sequence
  derived and/or modified sequence opt3 from N-myc__Homo_sapiens__AAH02712
augcccagcugcuccaccucuacaaugccuggcaugaucuguaagaacccagaccuggaguucgauucacuccagccgugcuuuuaccccgacgaagaugacuucuauuuugggggaccugauaguacuccacccggugaggacauuuggaaaaaguucgaacuucugccuacgccacccuugagcccuuccagaggcuuugccgagcacucuucggaaccaccgucaugggugaccgagauguuacuggagaaugaacuaugggggagccccgcugaggaagaugcauucggacucggcggucuagggggacuuacaccuaacccagucauacugcaagacuguauguggaguggcuuuuccgccagggagaaauuggagcgggcgguuucugaaaagcuccagcauggccgcgggcccccuacugcuggaagcaccgcccaguccccaggugcaggcgccgcuucacccgcagggcgaggacacggcggugccgcuggggccggacgugcgggcgcagcccugccggcugagcuggcccauccugcagcugaaugcguggaucccgccguaguguucccauuuccugucaauaaaagagagcccgcgccagugcccgccgccccugcuagugccccagcugccggcccggcaguugccagcggggcuggaaucgcggcacccgccggugcuccuggcguggccccacccaggccugggggacggcagacaucuggcggugaccacaaggcacucuccaccucaggggaagauacuuuaagcgacagugaugacgaggacgaugaggaagaggacgaagaggaagagauugaugucgugacaguagagaagcgcagaucuuccagcaacaccaaagccguuacgacuuucaccaucacagugaggccaaagaaugcugcccugggccccggacgggcacaaucgucugaacuuauuuugaaacgcugucugccgauccaucagcagcacaacuacgcggcuccuuccccauaugucgagucagaagacgcacccccucagaagaaaauaaagagugaggcaagcccccgaccacuaaaguccgugaucccucccaaagccaagucucucagcccaagaaauucagauagugaagacuccgagaggcggcguaaccacaauauucuggagcgccaaagaaggaacgaucuucggagcucuuuucugacuuugcgagaccaugugccggaacucgucaaaaaugagaaggcugccaaaguugugauccugaagaaagcaaccgaauacguacacucauuacaggcugaggagcaucagcugcuccuugaaaaggagaagcugcaggcccgccaacagcaguugcugaaaaagauugaacacgcgagaacaugcuga

SEQ ID NO: 9992 - RNA, 1395 nt, Artificial Sequence
  derived and/or modified sequence opt4 from N-myc__Homo_sapiens__AAH02712
augcccagcugcagcaccagcaccaugcccggcaugaucugcaagaaccccgaccuggaguucgacagccugcagcccugcuucuaccccgacgaggacgacuucuacuucggcggccccgacagcaccccccccggcgaggacaucuggaagaaguucgagcugcugcccacccccccccugagccccagcagaggcuucgccgagcacagcagcgagccccccagcugggugaccgagaugcugcuggagaacgagcuguggggcagccccgccgaggaggacgccuucggccugggcggccugggcggccugacccccaaccccgugauccugcaggacugcauguggagcggcuucagcgccagagagaagcuggagagagccgugagcgagaagcugcagcacggcagaggcccccccaccgccggcagcaccgcccagagccccggcgccggcgccgccagccccgccggcagaggccacggcggcgccgccggcgccggcagagccggcgccgcccugcccgccgagcuggcccaccccgccgccgagugcguggaccccgccgugguguuccccuuccccgugaacaagagagagcccgcccccgugcccgccgcccccgccagcgcccccgccgccggccccgccguggccagcggcgccggcaucgccgcccccgccggcgcccccggcguggccccccccagacccggcggcagacagaccagcggcggcgaccacaaggcccugagcaccagcggcgaggacacccugagcgacagcgacgacgaggacgacgaggaggaggacgaggaggaggagaucgacguggugaccguggagaagagaagaagcagcagcaacaccaaggccgugaccaccuucaccaucaccgugagacccaagaacgccgcccugggccccggcagagcccagagcagcgagcugauccugaagagaugccugcccauccaccagcagcacaacuacgccgcccccagccccuacguggagagcgaggacgcccccccccagaagaagaucaagagcgaggccagccccagaccccugaagagcgugaucccccccaaggccaagagccugagccccagaaacagcgacagcgaggacagcgagagaagaagaaaccacaacauccuggagagacagagaagaaacgaccugagaagcagcuuccugacccugagagaccacgugcccgagcuggugaagaacgagaaggccgccaagguggugauccugaagaaggccaccgaguacgugcacagccugcaggccgaggagcaccagcugcugcuggagaaggagaagcugcaggccagacagcagcagcugcugaagaagaucgagcacgccagaaccugcuga

SEQ ID NO: 9993 - RNA, 1395 nt, Artificial Sequence
  derived and/or modified sequence opt5 from N-myc__Homo_sapiens__AAH02712
augcccagcugcuccaccucuacaaugccuggcaugaucuguaagaacccggaccuggaguucgauagccuccagcccugcuuuuacccugacgaagaugacuucuauuuugggggacccgauuccacgccucccggcgaggacauuuggaaaaaguucgaacugcuuccuaccccgccccugucuccuagcagaggguuugccgagcacuccucugaacccccuagcugggugacagagaugcuccuggagaaugaacuuuggggaucccccgcugaggaagaugccuucggccucgggggacugggcggccugaccccgaacccugucauccugcaagacuguauguggagcggguuuucugcgcgggagaaacucgagcgcgcuguuuccgaaaagcugcagcauggaagaggacccccuacagccgggagcaccgcccagucucccggagcuggcgccgcuucccccgccgggcggggacacggcggcgcggccggggcuggacgcgccggcgcugcccuuccugcggagcuggcccauccggcugccgaaugcguggaucccgcuguggucuucccuuuucccgugaauaaaagagagccugcccccguuccggccgcuccugcgagcgcccccgcugccgggccugccguggcuucuggagccggcauugcggcucccgccggggccccuggagucgcucccccgcggccuggcggccgccagacauccgggggagaccacaaggcccucagcaccuccggcgaagauacgcugucugacagcgaugacgaggacgaugaggaagaggacgaagaggaagagaucgaugugguuaccguggagaagagacgguccagcucuaacacaaaagcugucaccacauucaccauuacggugcgccccaagaaugccgcgcuugggcccggcagagcccaauccagcgaacugauccucaaacggugucugccuauccaucagcagcacaacuacgcugccccgucucccuauguggagagcgaagacgcuccuccccagaagaaaauuaaguccgaggccucuccucgcccccucaagagcgucaucccucccaaagcgaagucccugagcccgagaaauucugauuccgaagacagcgagcggcgcagaaaccacaauauucuggagcggcaaagacgcaacgaucuucggucuuccuuucugacacucagagaccauguuccugaacuggugaaaaaugagaaggccgcuaaaguggucauccuuaagaaagccaccgaauacgugcacagccugcaggcugaggagcaucagcuccugcuggaaaaggagaagcuccaggcccgccaacagcagcugcuuaaaaagauugaacacgcccggacaugcuga

SEQ ID NO: 9994 - RNA, 1395 nt, Artificial Sequence
  derived and/or modified sequence opt6 from N-myc__Homo_sapiens__AAH02712
augccaucauguucaacaagcacaaugccaggaaugauaugcaaaaauccugaucuagaauucgacaguuuacaaccauguuucuauccagaugaagaugauuuuuacuucggcggaccagacucaacaccaccaggagaagauauauggaaaaaauuugaauuacuacccacccccccauuaucaccgaguagaggauucgcagaacauucaucagaaccaccaaguuggguaacagaaauguuacucgaaaacgaauuauggggaaguccugcggaagaagaugcuuuuggacuaggcggacuaggaggauuaacaccaaauccaguuauauuacaagacuguauguggucaggauucuccgcacgcgaaaaauuagaaagagcaguaucagaaaaacuacaacauggcagaggaccaccaacagcagguucaacagcucaaucucccggagcaggcgcagcaaguccagcaggaagaggacauggaggagccgcaggagcaggacgcgccggagcugcacuaccagcagaauuagcucauccagcagcagaauguguagacccagcaguaguuuuuccuuuuccuguaaauaaaagagaaccagccccaguaccagcagcuccagccucagcaccagcagcaggucccgccguagcaucaggagcaggaauagcagcaccagcaggagcaccuggaguggcaccuccacgaccagguggacgacaaacaagcgguggagaucacaaagcacuuucaaccucaggagaagauacauuaagugauagugaugaugaagacgaugaagaagaagacgaagaagaagaaauagacguagucacugucgaaaaaagacgaucaucaucaaacacaaaagcuguaacaacuuuuacgauuacaguaagaccaaaaaacgccgcacuagguccaggaagagcacaaucaucugaauuaauacuaaaaagaugucuaccaauucaucaacaacacaauuaugcagcaccaucaccauauguugaaagcgaagaugcaccaccacaaaaaaagauuaaaucugaagcaucaccaagaccauuaaaaaguguaauaccaccaaaagcaaaaucguuauccccucgaaacucagauucagaagauucagaacgaagaagaaaucauaacauucuagaaagacaacgaagaaaugauuuaagaaguucauuccuuacacuaagagaucauguuccagaacuaguaaaaaaugaaaaagcagcaaaaguuguaauucuaaaaaaagcaacagaauauguacauuccuuacaagcugaagaacaucaauuauuacuugaaaaagaaaaauuacaagcaagacaacaacaacuacuaaaaaaaauagaacacgcacgcacaugcuaa

SEQ ID NO: 9995 - protein, 112 aa, Artificial Sequence
  N-myc__Homo_sapiens__Q9H224
MRGAPGNCVGAEQALARRKRAQTVAIRGHPRPPGPPGDTRAESPPDPLQSAGVLEVGAGPRLPRPPREGSTPGIKTNGAERSPQSPAGRRADAELLHVHHAGHDLQEPRPRV

SEQ ID NO: 9996 - RNA, 339 nt, Artificial Sequence
  N-myc__Homo_sapiens__AAG40001
augcggggggcuccugggaacuguguuggagccgagcaagcgcuagccaggcgcaagcgcgcacagacuguagccauccgaggacacccccgcccccccggcccacccggagacacccgcgcagaaucgccuccggauccccugcagucggcgggaguguuggaggucggcgccggcccccgccuuccgcgccccccacgggaaggaagcacccccgguauuaaaacgaacggggcggaaagaagcccucagucgccggccgggaggcgagccgaugccgagcugcuccacguccaccaugccgggcaugaucugcaagaacccagaccucgaguuuga

SEQ ID NO: 9997 - RNA, 339 nt, Artificial Sequence
  derived and/or modified sequence opt1 from N-myc__Homo_sapiens__AAG40001
augcgcggcgcccccgggaacugcgugggcgccgagcaggcgcuggcccggcgcaagcgggcccagaccgucgccauccgcgggcacccgcggccgcccggcccgcccggggacacccgcgccgagagcccgcccgacccccuccaguccgcgggcgugcuggaggugggcgccgggccccggcugccccgcccgccccgggagggcagcacgcccgggaucaagaccaacggcgccgagcgcagcccccagucccccgccgggcggcgcgcggacgccgagcuccugcacguccaccacgccggccacgaccugcaggagccccggccccgcguguga

SEQ ID NO: 9998 - RNA, 339 nt, Artificial Sequence
  derived and/or modified sequence opt2 from N-myc__Homo_sapiens__AAG40001
augcgcggcgcccccggcaacugcgucggcgccgagcaggcccucgcccgccgcaagcgcgcccagaccgucgccauccgcggccacccccgcccccccggcccccccggcgacacccgcgccgaguccccccccgacccccuccaguccgccggcguccucgaggucggcgccggcccccgccucccccgccccccccgcgagggcuccacccccggcaucaagaccaacggcgccgagcgcuccccccagucccccgccggccgccgcgccgacgccgagcuccuccacguccaccacgccggccacgaccuccaggagccccgcccccgcgucuga

SEQ ID NO: 9999 - RNA, 339 nt, Artificial Sequence
  derived and/or modified sequence opt3 from N-myc__Homo_sapiens__AAG40001
augagaggcgcccccgggaacugcgugggagcugagcaggcacuggccaggcggaagcgcgcgcaaaccgucgcuauccgaggucacccucguccaccggggcccccuggcgacacaagagccgaaagcccacccgauccucuccaguccgcaggaguucuugaggugggcgccgguccaaggcugccccggccuccacgcgaagggucuacuccgggaauuaaaacgaauggcgcugagagaucaccccagaguccugcaggcaggcgggccgacgcugaauuguuacauguacaccaugccgggcacgaucugcaggagccacgcccccgaguguga

SEQ ID NO: 10000 - RNA, 339 nt, Artificial Sequence
  derived and/or modified sequence opt4 from N-myc__Homo_sapiens__AAG40001
augagaggcgcccccggcaacugcgugggcgccgagcaggcccuggccagaagaaagagagcccagaccguggccaucagaggccaccccagaccccccggcccccccggcgacaccagagccgagagcccccccgacccccugcagagcgccggcgugcuggaggugggcgccggccccagacugcccagaccccccagagagggcagcacccccggcaucaagaccaacggcgccgagagaagcccccagagccccgccggcagaagagccgacgccgagcugcugcacgugcaccacgccggccacgaccugcaggagcccagacccagaguguga

SEQ ID NO: 10001 - RNA, 339 nt, Artificial Sequence
  derived and/or modified sequence opt5 from N-myc__Homo_sapiens__AAG40001
augagaggcgcccccgggaacugcgugggagcugagcaggcccuggcgcggcgcaagagagcucaaaccgucgccauccggggccacccucgcccgcccgggccucccggagacacaagagccgaaagcccucccgauccucuccaguccgcuggcguucuggaggugggggccggaccgcggcuuccccgcccucccagagaaggcucuacgccuggcauuaaaaccaauggggcugagcggagcccccaguccccggccggacgcagagcggacgccgaacugcuccaugugcaccaugcuggccacgaucugcaggagccucggccccgcgucuga

SEQ ID NO: 10002 - RNA, 339 nt, Artificial Sequence
  derived and/or modified sequence opt6 from N-myc__Homo_sapiens__AAG40001
augagaggagcaccaggaaacuguguaggagcagaacaagcauuagcaagaagaaaaagagcacaaacaguagcaauaagaggacacccaagaccaccaggaccaccaggagauacaagagcagaaucaccuccagauccauuacaaucagcaggaguauuagaaguaggagcaggaccaagauuaccaagaccaccaagagaaggaucaacaccaggaauaaaaacaaacggagcagaaagaucaccacaaucaccagcaggaagaagagcagaugcagaacuauuacacguacaccaugcaggacacgauuuacaagaaccaagaccaagaguauaa

SEQ ID NO: 10003 - protein, 86 aa, Artificial Sequence
  N-myc__Homo_sapiens__V9H1L1
MRGAPGNCVGAEQALARRKRAQTVAIRGHPRPPGPPGDTRAESPPDPLQSAGGKEQGLQTARRPGKRRAPGQGKPWTGLRRAHRAP

SEQ ID NO: 10004 - RNA, 261 nt, Artificial Sequence
  N-myc__Homo_sapiens__CAA68677
augcggggggcuccugggaacuguguuggagccgagcaagcgcuagccaggcgcaagcgcgcacagacuguagccauccgaggacacccccgcccccccggcccacccggagacacccgcgcagaaucgccuccggauccccugcagucggcgggagguaaggagcagggcuugcaaaccgcccggcgcccagggaagcgacgagcgccggggcaaggcaagcccuggacgggauugcgacgugcgcaccgggcgcccuaa

SEQ ID NO: 10005 - RNA, 261 nt, Artificial Sequence
  derived and/or modified sequence opt1 from N-myc__Homo_sapiens__CAA68677
augcgcggcgcccccgggaacugcgugggcgccgagcaggcgcuggcccggcgcaagcgggcccagaccgucgccauccgcgggcacccccggccgcccggcccgcccggggacacccgcgccgagagcccgcccgacccccuccaguccgcgggcggcaaggagcaggggcugcagacggcccggcgccccggcaagcggcgcgcccccgggcagggcaagcccuggaccgggcugcggcgcgcccaccgggcgcccuga

SEQ ID NO: 10006 - RNA, 261 nt, Artificial Sequence
  derived and/or modified sequence opt2 from N-myc__Homo_sapiens__CAA68677
augcgcggcgcccccggcaacugcgucggcgccgagcaggcccucgcccgccgcaagcgcgcccagaccgucgccauccgcggccacccccgcccccccggcccccccggcgacacccgcgccgaguccccccccgacccccuccaguccgccggcggcaaggagcagggccuccagaccgcccgccgccccggcaagcgccgcgcccccggccagggcaagcccuggaccggccuccgccgcgcccaccgcgcccccuga

SEQ ID NO: 10007 - RNA, 261 nt, Artificial Sequence
  derived and/or modified sequence opt3 from N-myc__Homo_sapiens__CAA68677
augagaggcgcccccgggaacugcgugggagcugagcaggcacuggccaggcggaagcgcgcgcaaaccgucgcuauccgaggucacccucguccaccggggcccccuggcgacacaagagccgaaagcccacccgauccucuccaguccgcaggaggcaaagagcagggucuucagacugccaggcggccagggaagcgcagagcucccggacaaggcaaaccuuggacgggccugaggcgggcacaucgcgccccauga

SEQ ID NO: 10008 - RNA, 261 nt, Artificial Sequence
  derived and/or modified sequence opt4 from N-myc__Homo_sapiens__CAA68677
augagaggcgcccccggcaacugcgugggcgccgagcaggcccuggccagaagaaagagagcccagaccguggccaucagaggccaccccagaccccccggcccccccggcgacaccagagccgagagcccccccgacccccugcagagcgccggcggcaaggagcagggccugcagaccgccagaagacccggcaagagaagagcccccggccagggcaagcccuggaccggccugagaagagcccacagagcccccuga

SEQ ID NO: 10009 - RNA, 261 nt, Artificial Sequence
  derived and/or modified sequence opt5 from N-myc__Homo_sapiens__CAA68677
augagaggcgcccccgggaacugcgugggagcugagcaggcccuggcgcggcgcaagagagcucaaaccgucgccauccggggccacccucgcccgcccgggccucccggagacacaagagccgaaagcccucccgauccucuccaguccgcuggcgggaaagagcagggacugcagacggcccggcgcccgggcaagagacgggcucccggccaagggaaaccuuggaccggacuucgcagagcccaucgggcgcccuga

SEQ ID NO: 10010 - RNA, 261 nt, Artificial Sequence
  derived and/or modified sequence opt6 from N-myc__Homo_sapiens__CAA68677
augagaggagcaccaggaaauugcguaggagcagaacaagcauuagcaagaagaaaaagagcacaaacaguagcaauaagaggacauccaagaccaccaggaccaccaggagacacaagagcagaaucaccaccagacccacuacaaagugcaggaggaaaagaacaaggacuacaaacagcaagaagaccaggaaaaagaagagcaccaggacaaggaaaaccauggacaggauuaagaagagcacauagagcaccauaa

SEQ ID NO: 10011 - protein, 360 aa, Artificial Sequence
  Oct3__Homo_sapiens__Q01860
MAGHLASDFAFSPPPGGGGDGPGGPEPGWVDPRTWLSFQGPPGGPGIGPGVGPGSEVWGIPPCPPPYEFCGGMAYCGPQVGVGLVPQGGLETSQPEGEAGVGVESNSDGASPEPCTVTPGAVKLEKEKLEQNPEESQDIKALQKELEQFAKLLKQKRITLGYTQADVGLTLGVLFGKVFSQTTICRFEALQLSFKNMCKLRPLLQKWVEEADNNENLQEICKAETLVQARKRKRTSIENRVRGNLENLFLQCPKPTLQQISHIAQQLGLEKDVVRVWFCNRRQKGKRSSSDYAQREDFEAAGSPFSGGPVSFPLAPGPHFGTPGYGSPHFTALYSSVPFPEGEAFPPVSVTTLGSPMHSN

SEQ ID NO: 10012 - RNA, 1083 nt, Artificial Sequence
  Oct3__Homo_sapiens__AAI17436
auggcgggacaccuggcuucggauuucgccuucucgcccccuccaggugguggaggugaugggccaggggggccggagccgggcuggguugauccucggaccuggcuaagcuuccaaggcccuccuggagggccaggaaucgggccggggguugggccaggcucugaggugugggggauucccccaugccccccgccguaugaguucuguggggggauggcguacugugggccccagguuggaguggggcuagugccccaaggcggcuuggagaccucucagccugagggcgaagcaggagucgggguggagagcaacuccgauggggccuccccggagcccugcaccgucaccccuggugccgugaagcuggagaaggagaagcuggagcaaaacccggaggagucccaggacaucaaagcucugcagaaagaacucgagcaauuugccaagcuccugaagcagaagaggaucacccugggauauacacaggccgauguggggcucacccuggggguucuauuugggaagguauucagccaaacgaccaucugccgcuuugaggcucugcagcuuagcuucaagaacauguguaagcugcggcccuugcugcagaaguggguggaggaagcugacaacaaugaaaaucuucaggagauaugcaaagcagaaacccucgugcaggcccgaaagagaaagcgaaccaguaucgagaaccgagugagaggcaaccuggagaauuuguuccugcagugcccgaaacccacacugcagcagaucagccacaucgcccagcagcuugggcucgagaaggaugugguccgagugugguucuguaaccggcgccagaagggcaagcgaucaagcagcgacuaugcacaacgagaggauuuugaggcugcugggucuccuuucucagggggaccaguguccuuuccucuggccccagggccccauuuugguaccccaggcuaugggagcccucacuucacugcacuguacuccucggucccuuucccugagggggaagccuuucccccugucuccgucaccacucugggcucucccaugcauucaaacuga

SEQ ID NO: 10013 - RNA, 1083 nt, Artificial Sequence
  derived and/or modified sequence opt1 from Oct3__Homo_sapiens__AAI17436
auggccggccaccuggccagcgacuucgcguucuccccgccgcccgggggcgggggcgacgggcccggcggccccgagccgggguggguggacccccgcaccuggcucagcuuccagggcccgcccgggggccccgggaucggccccggcgucgggcccggcuccgaggugugggggaucccgcccugcccgccgcccuacgaguucugcggcggcauggccuacugcgggccccaggugggcgucgggcuggugccccagggcgggcuggagaccagccagcccgagggcgaggccggcgugggggucgaguccaacagcgacggcgccucccccgagcccugcacggugacccccggggccgugaagcucgagaaggagaagcuggagcagaaccccgaggagagccaggacaucaaggcgcugcagaaggagcucgagcaguucgccaagcugcugaagcagaagcggaucacccucggcuacacccaggccgacgucgggcugacgcugggcguccucuucggcaagguguucucccagaccaccaucugccgcuucgaggcccugcagcugagcuucaagaacaugugcaagcuccggccccugcugcagaaguggguggaggaggcggacaacaacgagaaccuccaggagaucugcaaggccgagacccuggugcaggcccgcaagcggaagcgcacguccaucgagaaccgggugcgcgggaaccuggagaaccucuuccugcagugccccaagcccacccugcagcagaucagccacaucgcccagcagcucggccuggagaaggacgucgugcgggugugguucugcaaccgccggcagaaggggaagcgcuccagcuccgacuacgcccagcgggaggacuucgaggcggccggcagccccuucuccgggggccccgucagcuucccgcuggcccccggcccccacuucgggaccccgggcuacgggagcccccacuucaccgcccucuacuccagcgugcccuuccccgagggcgaggccuucccgcccguguccgucacgacccugggcagccccaugcacuccaacuga

SEQ ID NO: 10014 - RNA, 1083 nt, Artificial Sequence
  derived and/or modified sequence opt2 from Oct3__Homo_sapiens__AAI17436
auggccggccaccucgccuccgacuucgccuucucccccccccccggcggcggcggcgacggccccggcggccccgagcccggcugggucgacccccgcaccuggcucuccuuccagggcccccccggcggccccggcaucggccccggcgucggccccggcuccgaggucuggggcaucccccccugccccccccccuacgaguucugcggcggcauggccuacugcggcccccaggucggcgucggccucgucccccagggcggccucgagaccucccagcccgagggcgaggccggcgucggcgucgaguccaacuccgacggcgccucccccgagcccugcaccgucacccccggcgccgucaagcucgagaaggagaagcucgagcagaaccccgaggagucccaggacaucaaggcccuccagaaggagcucgagcaguucgccaagcuccucaagcagaagcgcaucacccucggcuacacccaggccgacgucggccucacccucggcguccucuucggcaaggucuucucccagaccaccaucugccgcuucgaggcccuccagcucuccuucaagaacaugugcaagcuccgcccccuccuccagaagugggucgaggaggccgacaacaacgagaaccuccaggagaucugcaaggccgagacccucguccaggcccgcaagcgcaagcgcaccuccaucgagaaccgcguccgcggcaaccucgagaaccucuuccuccagugccccaagcccacccuccagcagaucucccacaucgcccagcagcucggccucgagaaggacgucguccgcgucugguucugcaaccgccgccagaagggcaagcgcuccuccuccgacuacgcccagcgcgaggacuucgaggccgccggcucccccuucuccggcggccccgucuccuucccccucgcccccggcccccacuucggcacccccggcuacggcuccccccacuucaccgcccucuacuccuccguccccuuccccgagggcgaggccuucccccccgucuccgucaccacccucggcucccccaugcacuccaacuga

SEQ ID NO: 10015 - RNA, 1083 nt, Artificial Sequence
  derived and/or modified sequence opt3 from Oct3__Homo_sapiens__AAI17436
auggccggccaccuggcuagcgacuucgcauuuagucccccuccagggggagguggcgaugggccgggaggccccgaaccugguuggguggacccaagaaccuggcucucuuuccaggggcccccuggaggcccaggcaucgggcccggagucgguccuggcucagaaguuugggggauuccaccgugucccccuccauacgaguuuugcggaggcauggccuauugcgguccccaaguggggguaggacuugugccucagggcggccuggaaacaagucagccagagggggaagcgggagucgguguggagagcaacuccgauggcgcuucucccgagccguguacuguuacgccuggggccgugaaguuggaaaaagagaaguuagaacagaaucccgaggagucgcaagacauaaaagcacugcagaaggaacuagagcaguucgccaaacuccugaagcagaagaggaucacccuuggauacacacaagcugaugucggccugacuuugggugugcucuuugggaaaguauucucacagaccacaauuugccgguuugaagcacugcagcugagcuucaagaacauguguaaacuccgcccauuacugcagaaguggguugaggaagccgacaauaacgagaaucuucaagagaucugcaaagcugaaaccuuggugcaggcccgaaagcguaagagaacuuccauugagaacaggguccggggcaaucuggaaaaccuauuucuccaguguccuaaacccacacugcaacagaucucccauauagcgcagcagcuuggacuggagaaggauguggugcgcgucugguucugcaauagaaggcaaaaaggcaagcggucuagcuccgacuaugcacagcgcgaagauuuugaggccgcugggucaccauucaguggaggucccguuagcuuuccuuuggccccaggcccgcacuucgggacccccggauacggcucuccucauuucacggcacucuauuccucagugccauuucccgagggugaggcuuucccuccaguaagcgugacuacccuggggagucccaugcacucuaacuga

SEQ ID NO: 10016 - RNA, 1083 nt, Artificial Sequence
  derived and/or modified sequence opt4 from Oct3__Homo_sapiens__AAI17436
auggccggccaccuggccagcgacuucgccuucagccccccccccggcggcggcggcgacggccccggcggccccgagcccggcuggguggaccccagaaccuggcugagcuuccagggcccccccggcggccccggcaucggccccggcgugggccccggcagcgagguguggggcaucccccccugccccccccccuacgaguucugcggcggcauggccuacugcggcccccaggugggcgugggccuggugccccagggcggccuggagaccagccagcccgagggcgaggccggcgugggcguggagagcaacagcgacggcgccagccccgagcccugcaccgugacccccggcgccgugaagcuggagaaggagaagcuggagcagaaccccgaggagagccaggacaucaaggcccugcagaaggagcuggagcaguucgccaagcugcugaagcagaagagaaucacccugggcuacacccaggccgacgugggccugacccugggcgugcuguucggcaagguguucagccagaccaccaucugcagauucgaggcccugcagcugagcuucaagaacaugugcaagcugagaccccugcugcagaaguggguggaggaggccgacaacaacgagaaccugcaggagaucugcaaggccgagacccuggugcaggccagaaagagaaagagaaccagcaucgagaacagagugagaggcaaccuggagaaccuguuccugcagugccccaagcccacccugcagcagaucagccacaucgcccagcagcugggccuggagaaggacguggugagagugugguucugcaacagaagacagaagggcaagagaagcagcagcgacuacgcccagagagaggacuucgaggccgccggcagccccuucagcggcggccccgugagcuucccccuggcccccggcccccacuucggcacccccggcuacggcagcccccacuucaccgcccuguacagcagcgugcccuuccccgagggcgaggccuucccccccgugagcgugaccacccugggcagccccaugcacagcaacuga

SEQ ID NO: 10017 - RNA, 1083 nt, Artificial Sequence
  derived and/or modified sequence opt5 from Oct3__Homo_sapiens__AAI17436
auggccggccaccuggcuagcgacuucgccuuuuccccgccucccgggggaggcggggauggacccggcgggccugagcccggauggguggacccuagaaccuggcucucuuuccaggggcccccuggcggcccgggaaucggccccggggucggaccuggcagcgaaguuugggggauucccccuugucccccgccuuacgaguuuugcggaggcauggcguauugcggcccccaagugggggugggacuggucccucagggcgggcuugaaacaucccagcccgagggagaagcuggcguggggguugagucuaacagcgauggagccucccccgagccuuguacggugaccccgggcgccgucaagcuggaaaaagagaagcucgaacagaaucccgaggagucucaagacaucaaagcucugcagaaggaacuugagcaguucgccaaacugcucaagcagaagcggauuacacugggcuacacccaagcugauguggggcugacacucggaguucuguuuggcaaaguguucagccagaccacaaucugccgcuuugaagcccuucagcuguccuucaagaacauguguaaacucagaccucugcuucagaagugggucgaggaagcggacaauaacgagaaucugcaagagauuugcaaagccgaaacccucgugcaggcucggaagcgcaagagaacgagcaucgagaaccgggugcgcgggaaucuggaaaaccuguuucuccagugucccaaaccuacccugcaacagaucucucauauugcccagcagcuuggacuggagaaggaugucguuagagugugguucugcaaucggcgccaaaaaggcaagagauccagcucugacuaugcucagcgggaagauuuugaggccgcggggucccccuucagcggcggaccggugucuuuuccucucgcccccggcccucacuucgggacacccggauacggcuccccucauuucaccgcucuguauagcuccguccccuuuccggagggggaagccuucccucccgugucuguuacaacccuuggaagccccaugcacuccaacuga

SEQ ID NO: 10018 - RNA, 1083 nt, Artificial Sequence
  derived and/or modified sequence opt6 from Oct3__Homo_sapiens__AAI17436
auggcaggacaucuagcaucagauuuugcauuuagcccaccaccaggagguggaggagacgguccaggaggaccagaaccaggauggguagauccaagaacaugguuaucguuucaaggaccaccaggcggaccuggaauaggaccaggaguaggcccaggaucagaaguauggggaauaccuccaugcccaccaccauaugaauucuguggaggaauggcauacuguggaccacaaguaggaguagguuuaguaccacaagguggauuagaaaccucacaaccagaaggugaagcaggaguaggaguagaaucaaauucagauggagcaucaccagaaccuuguacaguuacaccaggagcaguuaaacuugaaaaagaaaaauuagaacaaaacccagaagaaucacaagauauaaaagcauuacaaaaagaauuagaacaauucgcaaaauuauugaaacaaaaaagaauaacacucggauacacacaagcagauguaggauuaacuuuaggaguacuauuuggaaaaguauuuagucaaacaacaauauguagauucgaagcauuacaauuauccuuuaaaaauaugugcaaacuaagaccacuacuacaaaaauggguagaagaagcagauaauaaugaaaaccuucaagaaauauguaaagcagaaacacuaguacaagcaagaaaaagaaaaagaacaucaauagaaaauagaguaagagguaaucuagaaaauuuauuucuucaaugucccaaaccaacacuacaacaaauaucacacauagcacaacaauuaggauuagaaaaagauguaguaagaguaugguuuuguaaucgaagacaaaaaggaaaaagaucaucaucagauuaugcacaaagggaagauuucgaagcagcaggaaguccauuuaguggaggaccagucucauuuccauuagcacccgguccacauuuuggaacaccaggauauggaucaccacauuuuacagcuuuauauucaaguguaccauuuccugaaggugaagcuuucccaccaguaucaguuacaacauuaggaucaccaaugcauucaaacuaa

SEQ ID NO: 10019 - protein, 233 aa, Artificial Sequence [sequence omitted]

SEQ ID NO: 10020 - RNA, 702 nt, Artificial Sequence
  Sox15__Homo_sapiens__AAH00985
auggcgcuaccaggcuccucacaggaccaggccuggagccuggagccuccggcugccacggcugcugccuccucaucuucgggaccccaggagcgggagggcgcugggagccccgcggcccccgggacgcugccccuggagaaggugaagcggccgaugaacgcguucaugguguggagcuccgcucagcgccgccagauggcgcagcagaaccccaagaugcacaacuccgagaucuccaagcgccugggcgcgcaguggaagcugcuggacgaggacgagaagcggcccuucguggaggaggccaagcggcuccgcgcccgacaccugcgcgacuaccccgacuacaaguaccggccucggcgcaaggccaagagcucgggcgccggaccuucccgcugcggacagggaagaggcaaccuggccagcggcggcccgcucugggggccgggguacgcgaccacccaaccgagcagaggcuuuggguacagaccccccagcuacucgacagccuaccugccuggcagcuauggcucuucccacugcaaacuggaagcccccucaccgugcucccucccucagagugacccuaggcuccagggggaacugcugcccaccuauacccacuaccugcccccuggcucucccacuccauacaacccuccccuugcuggugcccccaugccccuaacccaccucuaa

SEQ ID NO: 10021 - RNA, 702 nt, Artificial Sequence
  derived and/or modified sequence opt1 from Sox15__Homo_sapiens__AAH00985
auggcccugcccggcagcucccaggaccaggccuggagccucgagccgcccgcggccaccgccgccgccuccagcuccagcgggccccaggagcgcgagggcgcggggucccccgccgccccgggcacccugccccuggagaaggugaagcggcccaugaacgccuucauggucuggagcuccgcgcagcgccggcagauggcccagcagaaccccaagaugcacaacagcgagaucuccaagcgccucggggcccaguggaagcugcuggacgaggacgagaagcggccguucguggaggaggccaagcgccuccgggcccgccaccuccgggacuaccccgacuacaaguaccgcccccggcgcaaggccaagagcuccggcgcgggccccagccggugcgggcagggccgcgggaaccuggccuccggcgggccgcuguggggccccggcuacgccacgacccagcccagccggggguucggcuaccggcccccguccuacagcaccgccuaccugcccggguccuacggcagcagccacugcaagcuggaggcgcccucccccugcagccucccgcaguccgacccccgccugcagggcgagcugcuccccaccuacacgcacuaccugcccccggggagccccacccccuacaacccgccccuggccggcgcccccaugccccucacccaccuguga

SEQ ID NO: 10022 - RNA, 702 nt, Artificial Sequence
  derived and/or modified sequence opt2 from Sox15__Homo_sapiens__AAH00985
auggcccuccccggcuccucccaggaccaggccuggucccucgagccccccgccgccaccgccgccgccuccuccuccuccggcccccaggagcgcgagggcgccggcucccccgccgcccccggcacccucccccucgagaaggucaagcgccccaugaacgccuucauggucugguccuccgcccagcgccgccagauggcccagcagaaccccaagaugcacaacuccgagaucuccaagcgccucggcgcccaguggaagcuccucgacgaggacgagaagcgccccuucgucgaggaggccaagcgccuccgcgcccgccaccuccgcgacuaccccgacuacaaguaccgcccccgccgcaaggccaaguccuccggcgccggccccucccgcugcggccagggccgcggcaaccucgccuccggcggcccccucuggggccccggcuacgccaccacccagcccucccgcggcuucggcuaccgcccccccuccuacuccaccgccuaccuccccggcuccuacggcuccucccacugcaagcucgaggcccccucccccugcucccucccccaguccgacccccgccuccagggcgagcuccuccccaccuacacccacuaccucccccccggcucccccacccccuacaaccccccccucgccggcgcccccaugccccucacccaccucuga

SEQ ID NO: 10023 - RNA, 702 nt, Artificial Sequence
  derived and/or modified sequence opt3 from Sox15__Homo_sapiens__AAH00985
auggcccugcccggcagcucccaggaccaggcuuggucucucgagccuccagcagccaccgcggcugccucaaguagcuccgggccgcaagaaagagagggagcagguucucccgccgcuccuggcacacuuccacuggaaaaggugaaaaggcccaugaacgcauucauggucuggucgucagcccagcggcgccagauggcucaacagaacccuaagaugcacaacagcgagaucaguaaacgauugggggcccaguggaaguuacuggaugaagacgagaaacguccauuuguugaggaagcgaagagacuaagggcacggcaucuccgcgauuaccccgacuauaaguacagaccuaggcggaaagccaaguccucuggagcuggcccaagccgcugcggucaggggcgaggaaaucuggccuccggcggcccgcuuugggggcccggauaugcaacuacgcaaccuucaagagguuucggcuacaggccacccaguuauagcaccgcuuaccugccugggucuuauggauccucacacuguaaauuggaggccccaagccccugcagucucccgcagucugauccucggcugcagggcgaacugcuccccacauacacucauuacuuaccaccugguucccccaccccauauaaucccccucuggcgggggccccaaugccgcuuacacacuuguga

SEQ ID NO: 10024 - RNA, 702 nt, Artificial Sequence
  derived and/or modified sequence opt4 from Sox15__Homo_sapiens__AAH00985
auggcccugcccggcagcagccaggaccaggccuggagccuggagccccccgccgccaccgccgccgccagcagcagcagcggcccccaggagagagagggcgccggcagccccgccgcccccggcacccugccccuggagaaggugaagagacccaugaacgccuucaugguguggagcagcgcccagagaagacagauggcccagcagaaccccaagaugcacaacagcgagaucagcaagagacugggcgcccaguggaagcugcuggacgaggacgagaagagacccuucguggaggaggccaagagacugagagccagacaccugagagacuaccccgacuacaaguacagacccagaagaaaggccaagagcagcggcgccggccccagcagaugcggccagggcagaggcaaccuggccagcggcggcccccuguggggccccggcuacgccaccacccagcccagcagaggcuucggcuacagaccccccagcuacagcaccgccuaccugcccggcagcuacggcagcagccacugcaagcuggaggcccccagccccugcagccugccccagagcgaccccagacugcagggcgagcugcugcccaccuacacccacuaccugccccccggcagccccacccccuacaaccccccccuggccggcgcccccaugccccugacccaccuguga

SEQ ID NO: 10025 - RNA, 702 nt, Artificial Sequence
  derived and/or modified sequence opt5 from Sox15__Homo_sapiens__AAH00985
auggcccugcccggcagcucccaggaccaggcuuggucucucgagccuccggccgcgaccgcugccgccagcuccucuagcgggccccaagaaagagagggagcuggcuccccugccgcucccgggacacugccucuugaaaaggugaaacggcccaugaacgccuucauggucuggucuagcgcgcagcgcagacagauggcccaacagaauccuaagaugcacaacuccgagaucagcaaacggcugggagcucaguggaagcuccuggaugaagacgagaaacgcccguuuguugaggaagccaagagacuucgggcucgccaucugagagauuaccccgacuauaaguaccggccucgcagaaaagccaagucuuccggcgcggggcccagccggugcggacagggccgcggcaaucucgccucugggggaccucuguggggccccggguaugcuacgacccaaccguccagaggauucggcuaccggccucccagcuauucuacagccuaccugccuggguccuauggaagcucccacuguaaacucgaggcucccucucccugcagccugccucaguccgauccgcgccuucagggcgaacugcuccccaccuacacacauuaccugccucccggcagcccuacccccuauaacccgccucuugccggggcccccaugccucugacacaccucuga

SEQ ID NO: 10026 - RNA, 702 nt, Artificial Sequence
  derived and/or modified sequence opt6 from Sox15__Homo_sapiens__AAH00985
auggcauuaccaggaucaucucaagaccaagcauggucauuagaaccaccagcagcaacagcugcagcaucaaguagcucaggaccacaagaaagagaaggagcaggcucacccgcagcaccaggaacauuaccacuagaaaaaguaaaaagacccaugaacgcauucauggucuggagcucagcacaaagaagacaaauggcccaacaaaauccaaaaaugcacaauucagaaauauccaaaagauuaggagcacaauggaaauuauuagaugaagaugaaaaaagaccauuuguagaagaagcaaaaagacuuagagccagacaccuaagagauuauccagauuacaaauacagaccaagaagaaaagcaaaaaguucuggagcaggaccuagcagauguggacaaggaagaggaaaccuagcaucaggaggaccccuauggggaccaggauacgcaacaacacaaccaucaagaggauuuggauauagaccaccaucuuacucaacagcauacuuaccaggaagcuauggaucaucccauugcaaacuagaagcaccaagcccauguucacuaccacaaucagacccaagacuacaaggagaauuacuaccaacauauacacauuaccuaccaccuggaucaccaacaccauauaauccaccauuagcaggagcaccaaugccacuaacacacuuauaa

SEQ ID NO: 10027 - protein, 391 aa, Artificial Sequence
  Sox1__Homo_sapiens__O00570
MYSMMMETDLHSPGGAQAPTNLSGPAGAGGGGGGGGGGGGGGGAKANQDRVKRPMNAFMVWSRGQRRKMAQENPKMHNSEISKRLGAEWKVMSEAEKRPFIDEAKRLRALHMKEHPDYKYRPRRKTKTLLKKDKYSLAGGLLAAGAGGGGAAVAMGVGVGVGAAAVGQRLESPGGAAGGGYAHVNGWANGAYPGSVAAAAAAAAMMQEAQLAYGQHPGAGGAHPHAHPAHPHPHHPHAHPHNPQPMHRYDMGALQYSPISNSQGYMSASPSGYGGLPYGAAAAAAAAAGGAHQNSAVAAAAAAAAASSGALGALGSLVKSEPSGSPPAPAHSRAPCPGDLREMISMYLPAGEGGDPAAAAAAAAQSRLHSLPQHYQGAGAGVNGTVPLTHI

SEQ ID NO: 10028 - RNA, 1176 nt, Artificial Sequence
  Sox1__Homo_sapiens__EAX09158
auguacagcaugaugauggagaccgaccugcacucgcccggcggcgcccaggcccccacgaaccucucgggccccgccggggcgggcggcggcgggggcggaggcgggggcggcggcggcggcgggggcgccaaggccaaccaggaccgggucaaacggcccaugaacgccuucaugguguggucccgcgggcagcggcgcaagauggcccaggagaaccccaagaugcacaacucggagaucagcaagcgccugggggccgaguggaaggucauguccgaggccgagaagcggccguucaucgacgaggccaagcggcugcgcgcgcugcacaugaaggagcacccggauuacaaguaccggccgcgccgcaagaccaagacgcugcucaagaaggacaaguacucgcuggccggcgggcuccuggcggccggcgcggguggcggcggcgcggcuguggccaugggcgugggcgugggcgugggcgcggcggccgugggccagcgccuggagagcccaggcggcgcggcgggcggcggcuacgcgcacgucaacggcugggccaacggcgccuaccccggcucgguggcggcggcggcggcggccgcggccaugaugcaggaggcgcagcuggccuacgggcagcacccgggcgcgggcggcgcgcacccgcacgcgcaccccgcgcacccgcacccgcaccacccgcacgcgcacccgcacaacccgcagcccaugcaccgcuacgacaugggcgcgcugcaguacagccccaucuccaacucgcagggcuacaugagcgcgucgcccucgggcuacggcggccuccccuacggcgccgcggccgccgccgccgccgcugcgggcggcgcgcaccagaacucggccguggcggcggcggcggcggcggcggccgcgucgucgggcgcccugggcgcgcugggcucucuggugaagucggagcccagcggcagcccgcccgccccagcgcacucgcgggcgccgugccccggggaccugcgcgagaugaucagcauguacuugcccgccggcgaggggggcgacccggcggcggcagcagcggccgcggcgcagagccggcugcacucgcugccgcagcacuaccagggcgcgggcgcgggcgugaacggcacggugccccugacgcacaucuag

SEQ ID NO: 10029 - RNA, 1176 nt, Artificial Sequence
  derived and/or modified sequence opt1 from Sox1__Homo_sapiens__EAX09158
auguacagcaugaugauggagaccgaccugcacucccccggcggggcccaggccccgaccaaccucagcggccccgcgggggccggcgggggcggcgggggcgggggcgggggcggcgggggcgggggcgccaaggccaaccaggaccgcgugaagcggcccaugaacgccuucauggucuggucccgcggccagcggcgcaagauggcgcaggagaaccccaagaugcacaacagcgagaucuccaagcggcugggggccgaguggaaggugaugagcgaggccgagaagcgcccguucaucgacgaggccaagcggcugcgcgcgcuccacaugaaggagcaccccgacuacaaguaccggccccgccggaagacgaagacccugcugaagaaggacaaguacucccucgccggcgggcugcuggccgccggcgccgggggcggcggggcggccguggccaugggcgucggggugggcgugggggccgccgcggucggccagcgccucgagagccccggcggggccgccggcgggggcuacgcccacgugaacgggugggccaacggcgcguacccgggcuccguggccgccgccgccgcggccgccgccaugaugcaggaggcgcagcuggccuacgggcagcaccccggcgccgggggcgcccacccccacgcccaccccgcgcacccgcacccccaccacccccacgcccacccccacaacccgcagcccaugcaccgguacgacaugggcgcccugcaguacagccccaucuccaacagccagggguacauguccgccagccccuccggcuacgggggccucccguacggggccgcggccgccgccgccgcggccgccggcggcgcccaccagaacagcgcggucgccgccgccgccgcggccgccgccgccuccagcggggcgcugggcgcccuggggucccucgucaagagcgagcccagcggcuccccgcccgcccccgcccacagccgcgcccccugccccggggaccugcgggagaugaucuccauguaccugcccgcgggcgagggcggggacccggccgccgccgcggccgccgccgcccagagccgccuccacucccugccccagcacuaccagggcgcgggggccggcgugaacgggaccgugccccugacccacaucuga

SEQ ID NO: 10030 - RNA, 1176 nt, Artificial Sequence
  derived and/or modified sequence opt2 from Sox1__Homo_sapiens__EAX09158
auguacuccaugaugauggagaccgaccuccacucccccggcggcgcccaggcccccaccaaccucuccggccccgccggcgccggcggcggcggcggcggcggcggcggcggcggcggcggcggcggcgccaaggccaaccaggaccgcgucaagcgccccaugaacgccuucauggucuggucccgcggccagcgccgcaagauggcccaggagaaccccaagaugcacaacuccgagaucuccaagcgccucggcgccgaguggaaggucauguccgaggccgagaagcgccccuucaucgacgaggccaagcgccuccgcgcccuccacaugaaggagcaccccgacuacaaguaccgcccccgccgcaagaccaagacccuccucaagaaggacaaguacucccucgccggcggccuccucgccgccggcgccggcggcggcggcgccgccgucgccaugggcgucggcgucggcgucggcgccgccgccgucggccagcgccucgagucccccggcggcgccgccggcggcggcuacgcccacgucaacggcugggccaacggcgccuaccccggcuccgucgccgccgccgccgccgccgccgccaugaugcaggaggcccagcucgccuacggccagcaccccggcgccggcggcgcccacccccacgcccaccccgcccacccccacccccaccacccccacgcccacccccacaacccccagcccaugcaccgcuacgacaugggcgcccuccaguacucccccaucuccaacucccagggcuacauguccgccucccccuccggcuacggcggccuccccuacggcgccgccgccgccgccgccgccgccgccggcggcgcccaccagaacuccgccgucgccgccgccgccgccgccgccgccgccuccuccggcgcccucggcgcccucggcucccucgucaaguccgagcccuccggcuccccccccgcccccgcccacucccgcgcccccugccccggcgaccuccgcgagaugaucuccauguaccuccccgccggcgagggcggcgaccccgccgccgccgccgccgccgccgcccagucccgccuccacucccucccccagcacuaccagggcgccggcgccggcgucaacggcaccgucccccucacccacaucuga

SEQ ID NO: 10031 - RNA, 1176 nt, Artificial Sequence
  derived and/or modified sequence opt3 from Sox1__Homo_sapiens__EAX09158
auguacagcaugaugauggagaccgaccugcacucccccggcggggcccaggcuccuacaaaccucucuggaccagccggugcaggcgggggaggcggugggggaggcggcgggggagguggcgggggagcgaaggcuaaucaagauagagugaaaaggccgaugaacgccuucauggucuggucacggggccagcgccgaaagauggcacaggaaaaucccaaaaugcauaacagugagaucagcaagcgucuuggugccgaauggaaaguuauguccgaggcugaaaagagaccuuuuauugacgaggcaaagaggcugcgggccuugcacaugaaagagcauccagauuauaaguaccgccccagaaggaaaacuaagacguuacugaaaaaggacaaguauucucuagcugggggacuccuggccgcgggcgcaggcgggggaggugccgcuguggccaugggcguaggggugggagucggcgcagcugccgugggucagcggcuugaaucgccugggggcgcggccggaggcggguacgcacacguuaauggaugggcuaacggugccuauccaggcucaguggcugccgcagccgcugcggcagccaugaugcaagaggcucagcuggccuacgggcagcaucccggagcaggcggugcccacccucacgcucauccagcccacccgcauccccaccacccucaugcacacccacauaauccccagccuaugcaccgcuaugauaugggggcguugcaauacagcccaauaaguaacucccagggcuacaugucugcuagccccuccggauauggcgggcucccguacggagccgcagccgcugccgcagcugccgcggguggcgcccaucagaauagcgcugucgcagccgcugccgcagcggccgcugccaguagcggggcacugggagcucugggcucucucgugaaauccgaaccuucagguucacccccagccccugcacacagucgagcccccugcccaggggacuuaagagagaugaucucuauguaucugcccgcuggcgagggaggcgauccugcggccgcagcugccgccgcugcacaguccaggcuucacagcuugccacaacauuaccagggggccggagcgggcguaaacgguaccguuccgcugacacacauuuga

SEQ ID NO: 10032 - RNA, 1176 nt, Artificial Sequence
  derived and/or modified sequence opt4 from Sox1__Homo_sapiens__EAX09158
auguacagcaugaugauggagaccgaccugcacagccccggcggcgcccaggcccccaccaaccugagcggccccgccggcgccggcggcggcggcggcggcggcggcggcggcggcggcggcggcggcgccaaggccaaccaggacagagugaagagacccaugaacgccuucaugguguggagcagaggccagagaagaaagauggcccaggagaaccccaagaugcacaacagcgagaucagcaagagacugggcgccgaguggaaggugaugagcgaggccgagaagagacccuucaucgacgaggccaagagacugagagcccugcacaugaaggagcaccccgacuacaaguacagacccagaagaaagaccaagacccugcugaagaaggacaaguacagccuggccggcggccugcuggccgccggcgccggcggcggcggcgccgccguggccaugggcgugggcgugggcgugggcgccgccgccgugggccagagacuggagagccccggcggcgccgccggcggcggcuacgcccacgugaacggcugggccaacggcgccuaccccggcagcguggccgccgccgccgccgccgccgccaugaugcaggaggcccagcuggccuacggccagcaccccggcgccggcggcgcccacccccacgcccaccccgcccacccccacccccaccacccccacgcccacccccacaacccccagcccaugcacagauacgacaugggcgcccugcaguacagccccaucagcaacagccagggcuacaugagcgccagccccagcggcuacggcggccugcccuacggcgccgccgccgccgccgccgccgccgccggcggcgcccaccagaacagcgccguggccgccgccgccgccgccgccgccgccagcagcggcgcccugggcgcccugggcagccuggugaagagcgagcccagcggcagcccccccgcccccgcccacagcagagcccccugccccggcgaccugagagagaugaucagcauguaccugcccgccggcgagggcggcgaccccgccgccgccgccgccgccgccgcccagagcagacugcacagccugccccagcacuaccagggcgccggcgccggcgugaacggcaccgugccccugacccacaucuga

SEQ ID NO: 10033 - RNA, 1176 nt, Artificial Sequence
  derived and/or modified sequence opt5 from Sox1__Homo_sapiens__EAX09158
auguacagcaugaugauggagaccgaccugcacucccccggcggggcccaggcuccuacaaaccucucuggaccggccggcgcugggggaggcgggggaggcggcgggggaggcgggggaggcgggggagcgaaggccaaucaagauagagugaaacggcccaugaacgccuucauggucuggagccgcggccagagacggaagauggcucaggaaaauccuaaaaugcauaacuccgagaucucuaagcgccugggcgccgaauggaaaguuaugagcgaggcugaaaagagacccuuuauugacgaggccaagcggcuucgcgcgcugcacaugaaagagcauccugauuauaaguacagaccccggcgcaaaacgaagacccuccugaaaaaggacaaguauucccuugccgggggacugcucgcugccggcgcugggggaggcggggccgcgguggccaugggagugggcgucggcgugggggcugccgcuguuggacagagacuggaaucuccuggcggggccgccggaggcggguacgcucacgugaauggcugggcgaacggagccuauccgggcagcgucgcugccgccgcugccgcggcugccaugaugcaagaggcccagcuggcuuacgggcagcaucccggagccggcggggcucacccucacgcccaucccgcgcacccucauccccaccacccgcaugcccacccucauaauccccagccuaugcaccgguaugauaugggagcucuccaauacucccccaucagcaacucucagggcuacauguccgccagccccucuggguauggcggacugccuuacggcgcugccgcggccgcugccgcugccgccgggggagcucaucaaaauuccgcgguggccgcugccgccgcugccgcggcugccagcucuggcgcccuuggggcucugggaucccucguuaaaagcgaaccguccggcucucccccugcccccgcgcacagccgcgcuccuugccccggggaccugagagagaugauuuccauguaucuuccggccggcgagggaggcgauccugccgcugccgcugccgcggccgcucagagccggcugcacucucucccccagcauuaccagggggccggagcuggcgugaacgggacagucccucugacccacaucuga

SEQ ID NO: 10034 - RNA, 1176 nt, Artificial Sequence
  derived and/or modified sequence opt6 from Sox1__Homo_sapiens__EAX09158
auguauaguaugaugauggaaacugauuuacauaguccaggaggagcucaagcaccgacaaaucugagugggccugcaggagcuggaggaggagggggagguggaggaggaggaggaggaggaggaggugcaaaagcaaaccaggacagaguaaaaagaccgaugaacgcauucaugguauggagucgaggacaaagaagaaaaauggcacaagaaaacccaaaaaugcacaauagcgaaauaucaaaaagauuaggggcagaauggaaaguaauguccgaagcagaaaaaagaccauuuauagaugaagcgaaaagauuaagggcacuucauaugaaagaacacccagauuauaaauauagaccaaggagaaaaacuaaaacauuauuaaaaaaagauaaauauaguuuagcgggaggacuauuagcagcaggagcuggaggaggaggugcagcaguagcaauggggguaggaguaggaguaggagccgcagcaguuggucaaagauuggaaaguccagggggagcugcaggaggaggauacgcucacguaaaugguugggcaaauggagcauauccaggaaguguagcagcagcagcagcagcagcagcaaugaugcaagaagcacaacuagcuuauggacaacauccaggagcagggggagcucauccacacgcacauccagcacauccucacccacaccauccacaugcacauccucauaauccacagccaaugcauagauacgauaugggugcauuacaauacagcccaauaaguaauucacaaggauauaugucagcaucaccuucaggauauggaggacuaccauauggagcagcggcagcagcagccgcagcagcaggaggagcacaucaaaauagugcaguugcggcagcggcagcggcagcagcagcaucuucaggagcuuuaggagcauuaggaucauuaguuaaaucagaaccaagcggaaguccaccagcaccugcacauaguagagcaccauguccuggagauuuaagagagaugauaaguauguauuuaccugcaggagaaggaggagauccagcagcagcagcagcagcagcagcacaaaguagauuacauucgcuaccacaacauuaucaaggagcaggugcaggaguaaauggaacuguaccauuaacacauauuuaa

SEQ ID NO: 10035 - protein, 317 aa, Artificial Sequence
  Sox2__Homo_sapiens__P48431
MYNMMETELKPPGPQQTSGGGGGNSTAAAAGGNQKNSPDRVKRPMNAFMVWSRGQRRKMAQENPKMHNSEISKRLGAEWKLLSETEKRPFIDEAKRLRALHMKEHPDYKYRPRRKTKTLMKKDKYTLPGGLLAPGGNSMASGVGVGAGLGAGVNQRMDSYAHMNGWSNGSYSMMQDQLGYPQHPGLNAHGAAQMQPMHRYDVSALQYNSMTSSQTYMNGSPTYSMSYSQQGTPGMALGSMGSVVKSEASSSPPVVTSSSHSRAPCQAGDLRDMISMYLPGAEVPEPAAPSRLHMSQHYQSGPVPGTAINGTLPLSHM

SEQ ID NO: 10036 - RNA, 954 nt, Artificial Sequence
  Sox2__Homo_sapiens__AAH13923
auguacaacaugauggagacggagcugaagccgccgggcccgcagcaaacuucggggggcggcggcggcaacuccaccgcggcggcggccggcggcaaccagaaaaacagcccggaccgcgucaagcggcccaugaaugccuucaugguguggucccgcgggcagcggcgcaagauggcccaggagaaccccaagaugcacaacucggagaucagcaagcgccugggcgccgaguggaaacuuuugucggagacggagaagcggccguucaucgacgaggcuaagcggcugcgagcgcugcacaugaaggagcacccggauuauaaauaccggccccggcggaaaaccaagacgcucaugaagaaggauaaguacacgcugcccggcgggcugcuggcccccggcggcaauagcauggcgagcggggucggggugggcgccggccugggcgcgggcgugaaccagcgcauggacaguuacgcgcacaugaacggcuggagcaacggcagcuacagcaugaugcaggaccagcugggcuacccgcagcacccgggccucaaugcgcacggcgcagcgcagaugcagcccaugcaccgcuacgacgugagcgcccugcaguacaacuccaugaccagcucgcagaccuacaugaacggcucgcccaccuacagcauguccuacucgcagcagggcaccccuggcauggcucuuggcuccauggguucgguggucaaguccgaggccagcuccagccccccugugguuaccucuuccucccacuccagggcgcccugccaggccggggaccuccgggacaugaucagcauguaucuccccggcgccgaggugccggaacccgccgcccccagcagacuucacaugucccagcacuaccagagcggcccggugcccggcacggccauuaacggcacacugccccucucacacauguga

SEQ ID NO: 10037 - RNA, 954 nt, Artificial Sequence
  derived and/or modified sequence opt1 from Sox2__Homo_sapiens__AAH13923
auguacaacaugauggagaccgagcugaagcccccgggcccccagcagaccagcgggggcgggggcgggaacuccacggccgccgcggccggcggcaaccagaagaacagccccgaccgcgugaagcggcccaugaacgccuucauggucuggucccgcgggcagcggcgcaagauggcccaggagaacccgaagaugcacaacagcgagaucuccaagcggcucggcgccgaguggaagcugcugagcgagaccgagaagcgccccuucaucgacgaggcgaagcggcuccgcgcccugcacaugaaggagcaccccgacuacaaguaccggccccgccggaagaccaagacccugaugaagaaggacaaguacacgcuccccgggggccugcuggcccccgggggcaacuccauggccagcggcgugggggugggcgcggggcucggcgccggcgucaaccagcgcauggacuccuacgcccacaugaacggguggagcaacggcuccuacagcaugaugcaggaccagcugggguacccccagcaccccggccugaacgcccacggggccgcgcagaugcagccgaugcaccgguacgacguguccgcccuccaguacaacagcaugaccuccagccagaccuacaugaacggcucccccaccuacagcauguccuacagccagcagggcacgcccgggauggcccugggcagcaugggguccguggucaagagcgaggccuccagcuccccgccgguggugaccagcuccagccacucccgcgcccccugccaggcgggcgaccugcgggacaugaucagcauguaccuccccggggccgagguccccgagccggccgcccccucccgccugcacaugagccagcacuaccaguccggccccgugcccggcaccgccaucaacgggacccugccgcucagccacauguga

SEQ ID NO: 10038 - RNA, 954 nt, Artificial Sequence
  derived and/or modified sequence opt2 from Sox2__Homo_sapiens__AAH13923
auguacaacaugauggagaccgagcucaagccccccggcccccagcagaccuccggcggcggcggcggcaacuccaccgccgccgccgccggcggcaaccagaagaacucccccgaccgcgucaagcgccccaugaacgccuucauggucuggucccgcggccagcgccgcaagauggcccaggagaaccccaagaugcacaacuccgagaucuccaagcgccucggcgccgaguggaagcuccucuccgagaccgagaagcgccccuucaucgacgaggccaagcgccuccgcgcccuccacaugaaggagcaccccgacuacaaguaccgcccccgccgcaagaccaagacccucaugaagaaggacaaguacacccuccccggcggccuccucgcccccggcggcaacuccauggccuccggcgucggcgucggcgccggccucggcgccggcgucaaccagcgcauggacuccuacgcccacaugaacggcugguccaacggcuccuacuccaugaugcaggaccagcucggcuacccccagcaccccggccucaacgcccacggcgccgcccagaugcagcccaugcaccgcuacgacgucuccgcccuccaguacaacuccaugaccuccucccagaccuacaugaacggcucccccaccuacuccauguccuacucccagcagggcacccccggcauggcccucggcuccaugggcuccgucgucaaguccgaggccuccuccuccccccccgucgucaccuccuccucccacucccgcgcccccugccaggccggcgaccuccgcgacaugaucuccauguaccuccccggcgccgagguccccgagcccgccgcccccucccgccuccacaugucccagcacuaccaguccggccccguccccggcaccgccaucaacggcacccucccccucucccacauguga

SEQ ID NO: 10039 - RNA, 954 nt, Artificial Sequence
  derived and/or modified sequence opt3 from Sox2__Homo_sapiens__AAH13923
auguacaacaugauggagaccgaacugaagcccccuggcccacagcaaacaagcgggggagguggcggaaauuccacugccgcugcagccgggggcaaccagaaaaauucuccggacagagugaagaggcccaugaacgcguucauggucuggucacggggucagcgccgaaaaauggcucaggagaauccuaagaugcacaacagugaaaucagcaaacgucucggggccgaguggaaacuucuguccgaaacggagaagagaccauuuauugaugaggcaaagagguugcgggccuuacauaugaaggaacaccccgacuauaaauaccgcccuagaaggaagaccaaaacacugaugaagaaggauaaauauacucuaccaggaggccuccuggcucccggcggaaauucuauggcaucggggguuggugugggcgccgggcuuggagcuggcguaaaccaacggauggacucauacgcccauaugaaugguuggagcaacgggaguuauuccaugaugcaggaucagcugggauacccucagcacccaggcuugaaugcgcauggcgcagcccaaaugcagccgaugcaccgcuaugacgugucugcucuccaguacaacagcaugaccuccucacagacauacaugaaugggagucccaccuauagcaugucuuacucccaacagggaacuccugguauggcccugggcucaauggggagcgucgugaagagugaggcaucuuccagcccacccguugugacaucgucuucccacucacgagcuccuugccaggccggagaucugagagacaugauaaguauguaucucccaggcgcggaaguccccgagccggccgcaccuagcagguuacauaugucccaacacuaccagucuggucccgugccagggaccgcuaucaacggcacgcugccucuuagccauauguga

SEQ ID NO: 10040 - RNA, 954 nt, Artificial Sequence
  derived and/or modified sequence opt4 from Sox2__Homo_sapiens__AAH13923
auguacaacaugauggagaccgagcugaagccccccggcccccagcagaccagcggcggcggcggcggcaacagcaccgccgccgccgccggcggcaaccagaagaacagccccgacagagugaagagacccaugaacgccuucaugguguggagcagaggccagagaagaaagauggcccaggagaaccccaagaugcacaacagcgagaucagcaagagacugggcgccgaguggaagcugcugagcgagaccgagaagagacccuucaucgacgaggccaagagacugagagcccugcacaugaaggagcaccccgacuacaaguacagacccagaagaaagaccaagacccugaugaagaaggacaaguacacccugcccggcggccugcuggcccccggcggcaacagcauggccagcggcgugggcgugggcgccggccugggcgccggcgugaaccagagaauggacagcuacgcccacaugaacggcuggagcaacggcagcuacagcaugaugcaggaccagcugggcuacccccagcaccccggccugaacgcccacggcgccgcccagaugcagcccaugcacagauacgacgugagcgcccugcaguacaacagcaugaccagcagccagaccuacaugaacggcagccccaccuacagcaugagcuacagccagcagggcacccccggcauggcccugggcagcaugggcagcguggugaagagcgaggccagcagcagcccccccguggugaccagcagcagccacagcagagcccccugccaggccggcgaccugagagacaugaucagcauguaccugcccggcgccgaggugcccgagcccgccgcccccagcagacugcacaugagccagcacuaccagagcggccccgugcccggcaccgccaucaacggcacccugccccugagccacauguga

SEQ ID NO: 10041 - RNA, 954 nt, Artificial Sequence
  derived and/or modified sequence opt5 from Sox2__Homo_sapiens__AAH13923
auguacaacaugauggagaccgaacugaagcccccuggcccgcagcaaacaagcgggggaggcgggggaaauuccacggccgcugccgcgggcgggaaccagaaaaauucucccgacagagugaagcggccuaugaacgcuuucauggucuggagccgcggacagagacggaaaauggcccaggagaaucccaagaugcacaacuccgaaaucucuaaacgccucggcgccgaguggaagcugcuuagcgaaaccgagaagagaccuuuuauugaugaggcuaaacggcugcgcgcccuccauaugaaggaacaccccgacuauaaauacagaccucggcgcaagacaaaaacccugaugaagaaggauaaauauacacuuccgggcgggcugcucgcucccggaggcaauuccauggccucugggguuggagugggcgcggggcugggagccggcgugaaccaaagaauggacagcuacgcucauaugaauggcugguccaacgggagcuauucuaugaugcaggaucagcugggauacccucagcaccccggccucaaugcccauggggcugcccaaaugcagccuaugcaccgguaugacgucuccgcgcugcaguacaacagcaugaccucuucccagacauacaugaauggaagccccaccuauucuauguccuacagccaacagggcacgccggggauggcccuuggauccaugggcucugugguuaagagcgaggcuuccagcucuccucccguggucaccuccagcucucacagccgcgccccuugccaggcuggcgaucugagagacaugaucuccauguaucuccccggggccgaagugcccgagccugccgcuccgucucggcugcauaugagccaacacuaccaguccggacccguuccuggcacagcgauuaacgggacccuuccccugagccauauguga

SEQ ID NO: 10042 - RNA, 954 nt, Artificial Sequence
  derived and/or modified sequence opt6 from Sox2__Homo_sapiens__AAH13923
auguacaacaugauggaaacagaauuaaaaccaccaggaccacaacaaacaucaggcggaggaggaggaaauucaacagcagcagcggcaggaggaaaucaaaaaaacagcccagauagaguaaaaagaccaaugaaugcauucaugguauggagccgaggacaaagaagaaaaauggcacaagaaaacccaaaaaugcacaacucagaaauaagcaaaagacuaggagcagaauggaaauuacuaucagaaacagaaaaacgaccauucauagacgaagcaaaaagacuacgagcauuacacaugaaagaacaucccgacuauaaauauagaccaagaagaaagacaaaaacacuaaugaaaaaagauaaauauacauuaccaggaggacuauuagccccaggaggaaacucaauggcaucaggaguuggaguuggagcaggacuaggagcaggaguaaaucaaagaauggauucauacgcacacaugaacggauggucaaacggaucauauucaaugaugcaagaccaauuaggauacccacaacauccaggauuaaacgcacauggagcagcacaaaugcaacccaugcacagauacgauguaucagcacuucaauauaacucaaugacaagcucacaaacauacaugaacggaucaccaacauauucuaugagcuauagccaacaagguacaccuggaauggcacugggaaguaugggaucaguaguaaaaagcgaagcaucaucaucaccaccaguaguaacaucaucaucccacaguagagcaccaugucaagcaggagauuuaagagacaugauaucaauguaucuaccaggagcagaaguaccagaaccagcagcaccaagcagauuacauaugucacaacauuaccaaaguggaccaguaccaggaacagcaauaaauggaacacuaccauuaucacacauguaa

SEQ ID NO: 10043 - protein, 446 aa, Artificial Sequence
  Sox3__Homo_sapiens__P41225
MRPVRENSSGARSPRVPADLARSILISLPFPPDSLAHRPPSSAPTESQGLFTVAAPAPGAPSPPATLAHLLPAPAMYSLLETELKNPVGTPTQAAGTGGPAAPGGAGKSSANAAGGANSGGGSSGGASGGGGGTDQDRVKRPMNAFMVWSRGQRRKMALENPKMHNSEISKRLGADWKLLTDAEKRPFIDEAKRLRAVHMKEYPDYKYRPRRKTKTLLKKDKYSLPSGLLPPGAAAAAAAAAAAAAAASSPVGVGQRLDTYTHVNGWANGAYSLVQEQLGYAQPPSMSSPPPPPALPPMHRYDMAGLQYSPMMPPGAQSYMNVAAAAAAASGYGGMAPSATAAAAAAYGQQPATAAAAAAAAAAMSLGPMGSVVKSEPSSPPPAIASHSQRACLGDLRDMISMYLPPGGDAADAASPLPGGRLHGVHQHYQGAGTAVNGTVPLTHI

SEQ ID NO: 10044 - RNA, 1341 nt, Artificial Sequence
  Sox3__Homo_sapiens__AAF73059
augcgaccuguucgagagaacucaucaggugcgagaagcccgcggguuccugcugauuuggcgcggagcauuuugauaagccuacccuucccgccggacucgcuggcccacaggcccccaagcuccgcuccgacggagucccagggccuuuucaccguggccgcuccagccccgggagcgccuucuccucccgccacgcuggcgcaccuucuucccgccccggcaauguacagccuucuggagacugaacucaagaaccccguagggacacccacacaagcggcgggcaccggcggccccgcagccccgggaggcgcaggcaagaguagugcgaacgcagccggcggcgcgaacucgggcggcggcagcagcgguggugcgagcggagguggcggggguacagaccaggaccgugugaaacggcccaugaacgccuucaugguauggucccgcgggcagcggcgcaaaauggcccuggagaaccccaagaugcacaauucugagaucagcaagcgcuugggcgccgacuggaaacugcugaccgacgccgagaagcgaccauucaucgacgaggccaagcgacuucgcgccgugcacaugaaggaguauccggacuacaaguaccgaccgcgccgcaagaccaagacgcugcucaagaaagauaaguacucccugcccagcggccuccugccucccggugccgcggccgccgccgccgcugccgcggccgcagccgcugccgccagcaguccggugggcgugggccagcgccuggacacguacacgcacgugaacggcugggccaacggcgcguacucgcuggugcaggagcagcugggcuacgcgcagcccccgagcaugagcagcccgccgccgccgcccgcgcugccgccgaugcaccgcuacgacauggccggccugcaguacagcccaaugaugccgcccggcgcucagagcuacaugaacgucgcugccgcggccgccgccgccucgggcuacgggggcauggcgcccucagccacagcagccgcggccgccgccuacgggcagcagcccgccaccgccgcggccgcagcugcggccgcagccgccaugagccugggccccaugggcucgguagugaagucugagcccagcucgccgccgcccgccaucgcaucgcacucucagcgcgcgugccucggcgaccugcgcgacaugaucagcauguaccugccacccggcggggacgcggccgacgccgccucuccgcugcccggcggucgccugcacggcgugcaccagcacuaccagggcgccgggacugcagucaacggaacggugccgcugacccacaucuga

SEQ ID NO: 10045 - RNA, 1341 nt, Artificial Sequence
  derived and/or modified sequence opt1 from Sox3__Homo_sapiens__AAF73059
augcgccccgugcgggagaacagcuccggcgcccgcagcccgcggguccccgccgaccuggcgcgcuccauccucaucagccugcccuuccccccggacucccuggcccaccggccccccagcuccgcccccaccgagagccaggggcucuucaccguggccgccccggcgcccggcgcccccucccccccggccacgcuggcccaccugcuccccgcgcccgccauguacagccugcuggagaccgagcucaagaaccccguggggaccccgacccaggccgccggcacggggggccccgccgcgcccggcggggccggcaaguccagcgccaacgccgccgggggcgcgaacuccgggggcggcagcuccgggggcgccagcgggggcggcgggggcaccgaccaggaccgcgucaagcggcccaugaacgccuucaugguguggucccgcgggcagcggcgcaagauggcccuggagaacccgaagaugcacaacagcgagaucuccaagcggcugggcgccgacuggaagcuccugaccgacgcggagaagcgccccuucaucgacgaggccaagcggcugcgcgccgugcacaugaaggaguaccccgacuacaaguaccggccccgccggaagaccaagacgcuccugaagaaggacaaguacagccugccgagcgggcuccugccccccggcgccgccgcggccgccgccgcggccgccgccgccgcggccgccgccuccagccccgucggcguggggcagcgccuggacaccuacacccacgugaacggcugggccaacggggcguacucccucguccaggagcagcugggcuacgcccagccgcccagcauguccagccccccgcccccccccgcccugccgcccaugcaccgguacgacauggccgggcuccaguacucccccaugaugcccccgggcgcccagagcuacaugaacguggcggccgccgccgcggccgccuccggcuacgggggcauggcccccagcgccaccgcggccgccgccgccgcguacgggcagcagcccgccacggccgccgccgcggccgccgccgcggccgccaugucccugggccccauggggagcguggucaaguccgagccgagcucccccccccccgccaucgccagccacucccagcgcgcgugccugggcgaccuccgggacaugaucagcauguaccugccgcccggcggggacgccgccgacgccgccuccccccugcccggcgggcgccuccacggcgugcaccagcacuaccagggcgcggggaccgccgugaacggcaccgucccgcugacccacaucuga

SEQ ID NO: 10046 - RNA, 1341 nt, Artificial Sequence
  derived and/or modified sequence opt2 from Sox3__Homo_sapiens__AAF73059
augcgccccguccgcgagaacuccuccggcgcccgcuccccccgcguccccgccgaccucgcccgcuccauccucaucucccuccccuucccccccgacucccucgcccaccgcccccccuccuccgcccccaccgagucccagggccucuucaccgucgccgcccccgcccccggcgcccccuccccccccgccacccucgcccaccuccuccccgcccccgccauguacucccuccucgagaccgagcucaagaaccccgucggcacccccacccaggccgccggcaccggcggccccgccgcccccggcggcgccggcaaguccuccgccaacgccgccggcggcgccaacuccggcggcggcuccuccggcggcgccuccggcggcggcggcggcaccgaccaggaccgcgucaagcgccccaugaacgccuucauggucuggucccgcggccagcgccgcaagauggcccucgagaaccccaagaugcacaacuccgagaucuccaagcgccucggcgccgacuggaagcuccucaccgacgccgagaagcgccccuucaucgacgaggccaagcgccuccgcgccguccacaugaaggaguaccccgacuacaaguaccgcccccgccgcaagaccaagacccuccucaagaaggacaaguacucccuccccuccggccuccucccccccggcgccgccgccgccgccgccgccgccgccgccgccgccgccgccgccuccucccccgucggcgucggccagcgccucgacaccuacacccacgucaacggcugggccaacggcgccuacucccucguccaggagcagcucggcuacgcccagccccccuccauguccucccccccccccccccccgcccucccccccaugcaccgcuacgacauggccggccuccaguacucccccaugaugccccccggcgcccaguccuacaugaacgucgccgccgccgccgccgccgccuccggcuacggcggcauggcccccuccgccaccgccgccgccgccgccgccuacggccagcagcccgccaccgccgccgccgccgccgccgccgccgccgccaugucccucggccccaugggcuccgucgucaaguccgagcccuccucccccccccccgccaucgccucccacucccagcgcgccugccucggcgaccuccgcgacaugaucuccauguaccucccccccggcggcgacgccgccgacgccgccuccccccuccccggcggccgccuccacggcguccaccagcacuaccagggcgccggcaccgccgucaacggcaccgucccccucacccacaucuga

SEQ ID NO: 10047 - RNA, 1341 nt, Artificial Sequence
  derived and/or modified sequence opt3 from Sox3__Homo_sapiens__AAF73059
augagacccgugagggagaacagcuccggcgcccggucuccucgcgucccagcugaccuggcacgaucaauccucauuagucuuccguuucccccugauagccuggcccaccguccacccuccucugcgccuaccgaaucgcagggguuguucacaguugcugccccagcacccggagccccuucaccaccggcuacuuuagcacaucugcuacccgccccugcuauguacagccuccuggagacggaacuuaagaauccaguggguacccccacacaagccgcgggcacugggggaccugcagccccaggcggugcugggaaaaguuccgccaacgcagcuggaggcgccaauucuggcgggggaagcuccgguggcgcgucagggggaggcggugggaccgaccaggauagaguaaagaggcccaugaacgccuucaugguguggagucggggacagcgcagaaaaauggcacuggagaauccgaagaugcacaacagcgaaauaucuaaaagguugggcgcugacuggaagcuccugacagaugccgagaagcggccuuuuaucgacgaggcuaaacgccugcgagccguccauaugaaggaauaucccgauuacaaauauagaccaaggcggaagaccaaaacucucuuaaagaaggacaaauacucccugccuucaggccuuuugcccccaggggcagccgcugcggcagccgcugccgcagccgcugccgcagcggcuagcagucccgugggaguuggucagcgucuggauacauauacccacgugaauggcugggccaacggggcauacucucuaguccaagagcagcucggauaugcccagccuccauccaugagcucgccgcccccuccacccgcucugccuccaaugcaucgcuacgacauggccggccuucaguacucucccaugaugccgccuggugcacaauccuauaugaauguggcugccgcggccgcugcagccucaggguacggcggaauggcuccaagugccacggcagcggccgcugccgcauauggccagcagcccgcuacugccgcagccgcugcggccgcagcugccgccaugagccuggggccuaugggauccguaguuaagucugaacccagcucaccaccucccgcuauugcaagucacucccagagagccugcuugggugaucucagggacaugaucagcauguaccugccaccgggcggggaugcggcugacgccgcaucuccuuuacccggaggccggcugcacggugugcaucaacacuaucagggggccggcaccgcugucaacggaacagugccacucacucauauuuga

SEQ ID NO: 10048 - RNA, 1341 nt, Artificial Sequence
  derived and/or modified sequence opt4 from Sox3__Homo_sapiens__AAF73059
augagacccgugagagagaacagcagcggcgccagaagccccagagugcccgccgaccuggccagaagcauccugaucagccugcccuucccccccgacagccuggcccacagaccccccagcagcgcccccaccgagagccagggccuguucaccguggccgcccccgcccccggcgcccccagcccccccgccacccuggcccaccugcugcccgcccccgccauguacagccugcuggagaccgagcugaagaaccccgugggcacccccacccaggccgccggcaccggcggccccgccgcccccggcggcgccggcaagagcagcgccaacgccgccggcggcgccaacagcggcggcggcagcagcggcggcgccagcggcggcggcggcggcaccgaccaggacagagugaagagacccaugaacgccuucaugguguggagcagaggccagagaagaaagauggcccuggagaaccccaagaugcacaacagcgagaucagcaagagacugggcgccgacuggaagcugcugaccgacgccgagaagagacccuucaucgacgaggccaagagacugagagccgugcacaugaaggaguaccccgacuacaaguacagacccagaagaaagaccaagacccugcugaagaaggacaaguacagccugcccagcggccugcugccccccggcgccgccgccgccgccgccgccgccgccgccgccgccgccgccgccagcagccccgugggcgugggccagagacuggacaccuacacccacgugaacggcugggccaacggcgccuacagccuggugcaggagcagcugggcuacgcccagccccccagcaugagcagccccccccccccccccgcccugccccccaugcacagauacgacauggccggccugcaguacagccccaugaugccccccggcgcccagagcuacaugaacguggccgccgccgccgccgccgccagcggcuacggcggcauggcccccagcgccaccgccgccgccgccgccgccuacggccagcagcccgccaccgccgccgccgccgccgccgccgccgccgccaugagccugggccccaugggcagcguggugaagagcgagcccagcagccccccccccgccaucgccagccacagccagagagccugccugggcgaccugagagacaugaucagcauguaccugccccccggcggcgacgccgccgacgccgccagcccccugcccggcggcagacugcacggcgugcaccagcacuaccagggcgccggcaccgccgugaacggcaccgugccccugacccacaucuga

SEQ ID NO: 10049 - RNA, 1341 nt, Artificial Sequence
  derived and/or modified sequence opt5 from Sox3__Homo_sapiens__AAF73059
augagacccgugcgggagaacuccuccggcgcccgcucuccuagagucccggcugaccuggcccggagcauccucauuucccugcccuucccucccgauucucuugcgcaccgcccucccagcuccgcuccuaccgaaucucaggggcuguuuacaguugccgccccggcucccggagccccuagcccucccgcuacgcucgcccaucugcuucccgcgccggccauguacucccugcucgagaccgaacugaagaauccugugggcacacccacccaagcugccgggacaggaggcccugcugcccccgggggagcgggcaaaagcucugccaacgcugccggcggggcuaauuccggaggcgggagcucuggaggcgccuccgggggaggcggcgggaccgaccaggauagagugaagcggcccaugaacgccuucauggucuggagccgcggacagagacggaaaauggcucuggagaauccuaagaugcacaacucugaaaucuccaaacgccucggcgcggacuggaagcugcuuacagaugccgagaagagaccguuuauugacgaggcuaaacggcugcgcgccgugcauaugaaggaauaucccgauuacaaauauagaccucggcgcaagaccaaaacgcuccugaagaaggacaaauacagccuucccuccgggcugcucccucccggagccgcugccgcggcugccgccgcugccgcugccgcggccgcugccucuagcccgguuggcguggggcagagacuggauaccuauacacacgucaauggaugggcuaacggcgccuacucccuggugcaagagcagcucggcuaugcgcagccucccagcaugucuuccccucccccucccccggcccugccucccaugcaucgguacgacauggcugggcuucaguacagccccaugaugccuccgggagcccaaucuuauaugaauguugcugccgccgcugcggccgcuagcggcuacgggggaauggcccccuccgccaccgcugccgcggcugccgccuauggccagcagccugcuacagccgcggcugccgccgcugccgcugccgcgaugucucuggggcccaugggcagcguggucaaguccgaaccuagcucucccccucccgccaucgcuucccacagccagagagccugccucggagaucugcgcgacaugauuucuauguaccuuccgccuggcggggaugcugccgacgccgcuagcccccugccuggaggccggcuccacggggugcaucaacacuaucagggagcgggcaccgccgugaacgggacggucccccugacacauaucuga

SEQ ID NO: 10050 - RNA, 1341 nt, Artificial Sequence
  derived and/or modified sequence opt6 from Sox3__Homo_sapiens__AAF73059
augagaccaguaagagaaaauaguucuggugcacguucaccuagaguaccagcagauuuagcuagaucaauacuuauuucauuaccauuuccaccagauagccuagcacaccgaccaccuucaucagcaccuacagaaucacaaggauuauuuacuguagcagcaccagcaccaggagcuccaucacccccagcuacacuagcacauuuacuaccagcaccagcaauguauagccuacuagaaacugaacuuaaaaaccccguaggaacacccacacaagcagcaggaacaggagguccagcagcaccaggaggagccggaaaaucaucagcuaacgcagcaggaggcgccaauucaggcggagguucuucaggaggugcauccggagguggaggaggcacagaccaagauagaguaaaaagaccaaugaaugcauucaugguauggaguagaggacaaagaagaaaaauggcacucgaaaacccaaaaaugcauaauagcgaaauaucaaaaagguuaggagcagacuggaaauuauugacagacgcagaaaaaagaccauuuauugaugaagcuaaaagacuaagagcuguucauaugaaagaauacccugauuauaaauauagaccaagaaggaaaacaaaaacauuauuaaaaaaagauaaauauucauuaccuaguggauuauuaccaccaggugcagcagcagcagcagcagccgcagcagcagcagcugcagcugcaucaucaccuguaggaguaggacaaagauuagauacauauacacauguaaauggaugggcaaauggcgcauauucauuaguacaagaacaauuaggauacgcucaaccaccaaguaugucaagcccaccuccuccaccagcauuaccaccaaugcauagauaugauauggcuggauuacaauauagcccaaugaugccacccggugcucaaucauauaugaauguagcagcagccgcagcagcagcuagcggauacggcggaauggcuccuagugcaacugcagcggcagcagcagcguacggacaacaaccagcaacagcagcagcugcagcagcagcugcugccgcaauguccuuaggaccgauggguucaguaguaaaaucagaaccaucaucuccaccaccagcaauagcaucacauucacaaagggcaugucuaggagauuuacgagauaugauaucaauguaucuaccaccaggaggagaugcagcagaugcggcaucuccauuaccuggaggaagacuacauggaguucaucaacauuaccaaggagcaggaacagcaguaaauggaacuguaccacuaacacacauauaa

SEQ ID NO: 10051 - DNA, 42 bp, Artificial Sequence
  5-UTR of human ribosomal protein Large 32 lacking the 5 terminal oligopyrimidine tract
ggcgcugccuacggagguggcagccaucuccuucucggcauc

SEQ ID NO: 10052 - RNA, 42 nt, Artificial Sequence
  5-UTR of human ribosomal protein Large 32 lacking the 5 terminal oligopyrimidine tract mRNA
ggcgcugccuacggagguggcagccaucuccuucucggcauc

SEQ ID NO: 10053 - DNA, 75 bp, Artificial Sequence
  5-UTR of human mitochondrial ATP synthase subunit alpha lacking the 5 terminal oligopyrimidine tract
gcggcucggccauuuugucccagucaguccggaggcugcggcugcagaaguaccgccugcggaguaacugcaaag

SEQ ID NO: 10054 - RNA, 75 nt, Artificial Sequence
  5-UTR of human mitochondrial ATP synthase subunit alpha lacking the 5 terminal oligopyrimidine tract mRNA
gcggcucggccauuuugucccagucaguccggaggcugcggcugcagaaguaccgccugcggaguaacugcaaag

SEQ ID NO: 10055 - DNA, 110 bp, Artificial Sequence
  3-UTR of Homo sapiens hemoglobin, alpha 1 (HBA1)
gcuggagccucgguggccaugcuucuugccccuugggccuccccccagccccuccuccccuuccugcacccguacccccguggucuuugaauaaagucugagugggcggc

SEQ ID NO: 10056 - RNA, 110 nt, Artificial Sequence
  3-UTR of Homo sapiens hemoglobin, alpha 1 (HBA1) mRNA
gcuggagccucgguggccaugcuucuugccccuugggccuccccccagccccuccuccccuuccugcacccguacccccguggucuuugaauaaagucugagugggcggc

SEQ ID NO: 10057 - DNA, 108 bp, Artificial Sequence
  3-UTR of Homo sapiens hemoglobin, alpha 2 (HBA2)
gcuggagccucgguagccguuccuccugcccgcugggccucccaacgggcccuccuccccuccuugcaccggcccuuccuggucuuugaauaaagucugagugggcag

SEQ ID NO: 10058 - RNA, 108 nt, Artificial Sequence
  3-UTR of Homo sapiens hemoglobin, alpha 2 (HBA2) mRNA
gcuggagccucgguagccguuccuccugcccgcugggccucccaacgggcccuccuccccuccuugcaccggcccuuccuggucuuugaauaaagucugagugggcag

SEQ ID NO: 10059 - DNA, 132 bp, Artificial Sequence
  3-UTR of Homo sapiens hemoglobin, beta (HBB)
gcucgcuuucuugcuguccaauuucuauuaaagguuccuuuguucccuaaguccaacuacuaaacugggggauauuaugaagggccuugagcaucuggauucugccuaauaaaaaacauuuauuuucauugc

SEQ ID NO: 10060 - RNA, 132 nt, Artificial Sequence
  3-UTR of Homo sapiens hemoglobin, beta (HBB) mRNA
gcucgcuuucuugcuguccaauuucuauuaaagguuccuuuguucccuaaguccaacuacuaaacugggggauauuaugaagggccuugagcaucuggauucugccuaauaaaaaacauuuauuuucauugc

SEQ ID NO: 10061 - DNA, 44 bp, Artificial Sequence
  Center, alpha-complex-binding portion of the 3UTR of an alpha-globin gene (muag)
gcccgaugggccucccaacgggcccuccuccccuccuugcaccg

SEQ ID NO: 10062 - RNA, 44 nt, Artificial Sequence
  Center, alpha-complex-binding portion of the 3UTR of an alpha-globin gene (muag) mRNA
gcccgaugggccucccaacgggcccuccuccccuccuugcaccg

SEQ ID NO: 10063 - DNA, 186 bp, Artificial Sequence
  3-UTR of human albumin
caucacauuuaaaagcaucucagccuaccaugagaauaagagaaagaaaaugaagaucaaaagcuuauucaucuguuuuucuuuuucguugguguaaagccaacacccugucuaaaaaacauaaauuucuuuaaucauuuugccucuuuucucugugcuucaauuaauaaaaaauggaaagaaucu

SEQ ID NO: 10064 - RNA, 186 nt, Artificial Sequence
  3-UTR of human albumin mRNA
caucacauuuaaaagcaucucagccuaccaugagaauaagagaaagaaaaugaagaucaaaagcuuauucaucuguuuuucuuuuucguugguguaaagccaacacccugucuaaaaaacauaaauuucuuuaaucauuuugccucuuuucucugugcuucaauuaauaaaaaauggaaagaaucu

SEQ ID NO: 10065 - DNA, 186 bp, Artificial Sequence
  3-UTR albumin7
caucacauuuaaaagcaucucagccuaccaugagaauaagagaaagaaaaugaagaucaauagcuuauucaucucuuuuucuuuuucguugguguaaagccaacacccugucuaaaaaacauaaauuucuuuaaucauuuugccucuuuucucugugcuucaauuaauaaaaaauggaaagaaccu

SEQ ID NO: 10066 - RNA, 186 nt, Artificial Sequence
  3-UTR albumin7 mRNA
caucacauuuaaaagcaucucagccuaccaugagaauaagagaaagaaaaugaagaucaauagcuuauucaucucuuuuucuuuuucguugguguaaagccaacacccugucuaaaaaacauaaauuucuuuaaucauuuugccucuuuucucugugcuucaauuaauaaaaaauggaaagaaccu

SEQ ID NO: 10067 - DNA, 187 bp, Artificial Sequence
  3-UTR ALB7
gcaucacauuuaaaagcaucucagccuaccaugagaauaagagaaagaaaaugaagaucaauagcuuauucaucucuuuuucuuuuucguugguguaaagccaacacccugucuaaaaaacauaaauuucuuuaaucauuuugccucuuuucucugugcuucaauuaauaaaaaauggaaagaaccu

SEQ ID NO: 10068 - RNA, 187 nt, Artificial Sequence
  3-UTR ALB7 mRNA
gcaucacauuuaaaagcaucucagccuaccaugagaauaagagaaagaaaaugaagaucaauagcuuauucaucucuuuuucuuuuucguugguguaaagccaacacccugucuaaaaaacauaaauuucuuuaaucauuuugccucuuuucucugugcuucaauuaauaaaaaauggaaagaaccu

SEQ ID NO: 10069 - DNA, 24 bp, Artificial Sequence
  histone stem-loop sequence
caaaggcucuuuucagagccacca

SEQ ID NO: 10070 - RNA, 24 nt, Artificial Sequence
  histone stem-loop sequence mRNA
caaaggcucuuuucagagccacca

SEQ ID NO: 10071 - DNA, 13 bp, Artificial Sequence
  Kozak
gccgccaccaugg
